(19) United States
(12) Patent Application Publication
(10) Pub. No.: US 2022/0017597 A1
(43) Pub. Date: Jan. 20, 2022

(54) MULTIMERIC T-CELL MODULATORY POLYPEPTIDES AND METHODS OF USE THEREOF

(71) Applicant: Cue Biopharma, Inc., Cambridge, MA (US)

(72) Inventors: Ronald D. Seidel, III, Cambridge, MA (US); Rodolfo Chaparro, Cambridge, MA (US)

(21) Appl. No.: 17/490,600

(22) Filed: Sep. 30, 2021

Related U.S. Application Data
(63) Continuation of application No. PCT/US2020/037919, filed on Jun. 16, 2020.
(60) Provisional application No. 62/863,754, filed on Jun. 19, 2019.

(51) Int. Cl. C07K 14/74

(52) U.S. Cl. CPC C07K 14/70539; C07K 2319/40; A61K 38/00; C07K 2319/02; C07K 2319/33

(57) ABSTRACT

The present disclosure provides T-cell modulatory multimeric polypeptides that comprise an immunomodulatory N polypeptide, a MUC1 epitope-presenting peptide, and class I MHC polypeptides. A T-cell modulatory multimeric polypeptide is useful for modulating the activity of a T cell, and for modulating an immune response in an individual. The present disclosure provides a T-cell modulatory multimeric polypeptide (TMMP) comprising: a) a first polypeptide; and b) a second polypeptide, wherein the TMMP comprises a MUC1 peptide; a first major histocompatibility complex (MHC) polypeptide; a second MHC polypeptide; one or more immunomodulatory polypeptides; and optionally an immunoglobulin (Ig) Fc polypeptide or a non-lg scaffold.

### CROSS-REFERENCE

[0001] This application claims the benefit of U.S. Provisional Patent Application No. 62/863,754, filed Jun. 19, 2019, which application is incorporated herein by reference in its entirety.

### INTRODUCTION

[0002] An adaptive immune response involves the engagement of the T cell receptor (TCR), present on the surface of a T cell, with a small peptide antigen non-covalently presented on the surface of an antigen presenting cell (APC) by a major histocompatibility complex (MHC; also referred to in humans as a human leukocyte antigen (HLA) complex). This engagement represents the immune system's targeting mechanism and is a requisite molecular interaction for T cell modulation (activation or inhibition) and effector function. Following epitope-specific cell targeting, the targeted T cells are activated through engagement of costimulatory proteins found on the APC with counterpart costimulatory proteins the T cells. Both signals—epitope/TCR binding and engagement of APC costimulatory proteins with T cell costimulatory proteins—are required to drive T cell specificity and activation or inhibition. The TCR is specific for a given epitope; however, the costimulatory protein not epitope specific and instead is generally expressed on all T cells or on large T cell subsets.

### SUMMARY

[0003] The present disclosure provides T-cell modulatory multimeric polypeptides (TMMPs) that comprise an immunomodulatory polypeptide, class I HLA polypeptides (a class I HLA heavy chain polypeptide and a β2 microglobulin polypeptide), and a mucin-1 (MUC1) peptide that presents an epitope to a T-cell receptor. A TMMP is useful for modulating the activity of a T cell, and for modulating an immune response in an individual.

### BRIEF DESCRIPTION OF THE DRAWINGS

[0004] FIGS. 1A-1F are schematic depictions of various TMMPs of the present disclosure.

[0005] FIGS. 2A-2F are schematic depictions of various disulfide-linked TMMPs of the present disclosure.

[0006] FIGS. 3A-3G provide amino acid sequences of immunoglobulin Fc polypeptides. The sequences are set forth in: SEQ ID NOs: 19-30.

[0007] FIG. 4 provides a multiple amino acid sequence alignment of beta-2 microglobulin (β2M) precursors (i.e., including the leader sequence) from Homo sapiens (NP_004039.1; SEQ ID NO:31), Pan troglodytes (NP_001009066.1; SEQ ID NO:31), Macaca mulatta (NP_001040602.1; SEQ ID NO:32), Bos taurus (NP_776318.1; SEQ ID NO:33) and Mus musculus (NP_033865.2; SEQ ID NO:34). Amino acids 1-20 are a signal peptide.

[0008] FIGS. 5A-5C provide amino acid sequences of full-length human HLA heavy chains of alleles A*0101 (SEQ ID NO: 35), A*1101 (SEQ ID NO: 36), A*2402 (SEQ ID NO: 37), and A*3303 (SEQ ID NO: 38) (FIG. 7A); full-length human HLA heavy chain of allele B*0702 (SEQ ID NO: 39) (FIG. 7B); and a full-length human HLA-C heavy chain (SEQ ID NO: 40) (FIG. 7C).

[0009] FIG. 6 provides an alignment of eleven mature MHC class I heavy chain amino acid sequences without their leader sequences, transmembrane domains, and intracellular domains. The sequences are set forth from top to bottom as follows: SEQ ID NOs: 41-51.

[0010] FIGS. 7A-7B provide an alignment of HLA-A heavy chain amino acid sequences (FIG. 7A; SEQ ID NO: 52-60, respectively) and a consensus sequence (FIG. 7B: 61).

[0011] FIGS. 8A-8B provide an alignment of HLA-B heavy chain amino acid sequences (FIG. 8A; SEQ ID NOs: 62-68, respectively) and a consensus sequence (FIG. 8B; SEQ ID NO: 69).

[0012] FIGS. 9A-9B provide an alignment of HLA-C heavy chain amino acid sequences (FIG. 9A; SEQ ID NOs: 70-78, respectively) and a consensus sequence (FIG. 9B; SEQ ID NO: 79).

[0013] FIG. 10 provides a consensus amino acid sequence for each of HLA-E, -F, and -G heavy chains (SEQ ID NOs: 80-82, respectively). Variable amino acid (aa) positions are indicated as “X” residues sequentially numbered; the locations of amino acids 84, 139, and 236 are double underlined.

[0014] FIG. 11 provides an alignment of consensus amino acid sequences for HLA-A (SEQ ID NO: 83), -B (SEQ ID NO: 84), -C(SEQ ID NO: 85), -E (SEQ ID NO: 86), -F (SEQ ID NO: 87), and -G (SEQ ID NO: 88).

[0015] FIG. 12A-12D provide schematic depictions of multiple disulfide-linked TMMP of the present disclosure.

[0016] FIGS. 13A and 13B provide amino acid sequences of examples of polypeptides suitable for inclusion in a TMMP of the present disclosure. The sequences are set forth in SEQ ID NOs: 594-595, respectively.

[0017] FIG. 14A-14L provide amino acid sequences of examples of polypeptides suitable for inclusion in a TMMP of the present disclosure. The sequences are set forth in SEQ ID NOs: 596-607, respectively.

[0018] FIG. 15A-15C provide schematic depictions of examples of configurations of disulfide-linked TMMPs of the present disclosure.

[0019] FIG. 16 provide schematic depictions of examples of positions of immunomodulatory polypeptides in TMMPs of the present disclosure.

### DEFINITIONS

[0020] The terms “polynucleotide” and “nucleic acid,” used interchangeably herein, refer to a polymeric form of nucleotides of any length, either ribonucleotides or deoxyribonucleotides. Thus, this term includes, but is not limited to, single-, double-, or multi-stranded DNA or RNA, genomic DNA, cDNA, DNA-RNA hybrids, or a polymer comprising purine and pyrimidine bases or other natural, chemically or biochemically modified, non-natural, or derivatized nucleotide bases.

[0021] The terms “peptide,” “polypeptide,” and “protein” are used interchangeably herein, and refer to a polymeric form of amino acids of any length, which can include coded and non-coded amino acids, chemically or biochemically modified or derivatized amino acids, and polypeptides having modified peptide backbones.

[0022] A polynucleotide or polypeptide has a certain percent “sequence identity” to another polynucleotide or polypeptide, meaning that, when aligned, that percentage of bases or amino acids are the same, and in the same relative position, when comparing the two sequences. Sequence identity can be determined in a number of different ways. To determine sequence identity, sequences can be aligned using various convenient methods and computer programs (e.g., BLAST, T-COFFEE, MUSCLE, MAFFT, etc.), available over the world wide web at sites including ncbi.nlm.nili.gov/BLAST, ebi.ac.uk/Tools/msa/tcoffee/, ebi.ac.uk/Tools/msa/muscle/, mafft.cbrc.jp/alignment/software/. See, e.g., Altschul et al. (1990), J. Mol. Bioi. 215:403-10.

[0023] The term “conservative amino acid substitution” refers to the interchangeability in proteins of amino acid residues having similar side chains. For example, a group of amino acids having aliphatic side chains consists of glycine, alanine, valine, leucine, and isoleucine; a group of amino acids having aliphatic-hydroxyl side chains consists of serine and threonine; a group of amino acids having amide containing side chains consisting of asparagine and glutamine; a group of amino acids having aromatic side chains consists of phenylalanine, tyrosine, and tryptophan; a group of amino acids having basic side chains consists of lysine, arginine, and histidine; a group of amino acids having acidic side chains consists of glutamate and aspartate; and a group of amino acids having sulfur containing side chains consists of cysteine and methionine. Exemplary conservative amino acid substitution groups are: valine-leucine-isoleucine, phenylalanine-tyrosine, lysine-arginine, alanine-valine-glycine, and asparagine-glutamine.

[0024] The term “immunological synapse” or “immune synapse” as used herein generally refers to the natural interface between two interacting immune cells of an adaptive immune response including, e.g., the interface between an antigen-presenting cell (APC) or target cell and an effector cell, e.g., a lymphocyte, an effector T cell, a natural killer cell, and the like. An immunological synapse between an APC and a T cell is generally initiated by the interaction of a T cell antigen receptor and major histocompatibility complex molecules, e.g., as described in Bromley et al., Annu Rev Immunol. 2001; 19:375-96; the disclosure of which is incorporated herein by reference in its entirety.

[0025] “T cell” includes all types of immune cells expressing CD3, including T-helper cells (CD4⁺ cells), cytotoxic T-cells (CD8⁺ cells), T-regulatory cells (Treg), and NK-T cells.

[0026] The term “immunomodulatory polypeptide” (also referred to as a “co-stimulatory polypeptide”), as used herein, includes a polypeptide on an antigen presenting cell (APC) (e.g., a dendritic cell, a B cell, and the like) that specifically binds a cognate co-immunomodulatory polypeptide on a T cell, thereby providing a signal which, in addition to the primary signal provided by, for instance, binding of a TCR/CD3 complex with a major histocompatibility complex (MHC) polypeptide loaded with peptide, mediates a T cell response, including, but not limited to, proliferation, activation, differentiation, and the like. An immunomodulatory polypeptide can include, but is not limited to, CD7, B7-1 (CD80), B7-2 (CD86), PD-L1, PD-L2, 4-1BBL, OX40L, Fas ligand (FasL), inducible costimulatory ligand (ICOS-L), intercellular adhesion molecule (ICAM), CD30L, CD40, CD70, CD83, HLA-G, MICA, MICB, HVEM, lymphotoxin beta receptor, 3/TR6, ILT3, ILT4, HVEM, an agonist or antibody that binds Toll ligand receptor and a ligand that specifically binds with B7-H3.

[0027] As noted above, an “immunomodulatory polypeptide” (also referred to herein as a “MOD”) specifically binds a cognate co-immunomodulatory polypeptide on a T cell.

[0028] An “immunomodulatory domain” (“MOD”) of a TMMP of the present disclosure binds a cognate co-immunomodulatory polypeptide, which may be present on a target T cell.

[0029] “Heterologous,” as used herein, means a nucleotide or polypeptide that is not found in the native nucleic acid or protein, respectively.

[0030] “Recombinant,” as used herein, means that a particular nucleic acid (DNA or RNA) is the product of various combinations of cloning, restriction, polymerase chain reaction (PCR) and/or ligation steps resulting in a construct having a structural coding or non-coding sequence distinguishable from endogenous nucleic acids found in natural systems. DNA sequences encoding polypeptides can be assembled from cDNA fragments or from a series of synthetic oligonucleotides, to provide a synthetic nucleic acid which is capable of being expressed from a recombinant transcriptional unit contained in a cell or in a cell-free transcription and translation system.

[0031] The terms “recombinant expression vector,” or “DNA construct” are used interchangeably herein to refer to a DNA molecule comprising a vector and at least one insert. Recombinant expression vectors are usually generated for the purpose of expressing and/or propagating the insert(s), or for the construction of other recombinant nucleotide sequences. The insert(s) may or may not be operably linked to a promoter sequence and may or may not be operably linked to DNA regulatory sequences.

[0032] As used herein, the term “affinity” refers to the equilibrium constant for the reversible binding of two agents (e.g., an antibody and an antigen) and is expressed as a dissociation constant (K_{D}). Affinity can be at least 1-fold greater, at least 2-fold greater, at least 3-fold greater, at least 4-fold greater, at least 5-fold greater, at least 6-fold greater, at least 7-fold greater, at least 8-fold greater, at least 9-fold greater, at least 10-fold greater, at least 20-fold greater, at least 30-fold greater, at least 40-fold greater, at least 50-fold greater, at least 60-fold greater, at least 70-fold greater, at least 80-fold greater, at least 90-fold greater, at least 100-fold greater, or at least 1,000-fold greater, or more, than the affinity of an antibody for unrelated amino acid sequences. Affinity of an antibody to a target protein can be, for example, from about 100 nanomolar (nM) to about 0.1 nM, from about 100 nM to about 1 picomolar (pM), or from about 100 nM to about 1 femtomolar (fM) or more. As used herein, the term “avidity” refers to the resistance of a complex of two or more agents to dissociation after dilution. The terms “immunoreactive” and “preferentially binds” are used interchangeably herein with respect to antibodies and/or antigen-binding fragments.

[0033] The term “binding,” as used herein (e.g. with reference to binding of a TMMP to a polypeptide (e.g., a T-cell receptor) on a T cell), refers to a non-covalent interaction between two molecules. Non-covalent binding refers to a direct association between two molecules, due to, for example, electrostatic, hydrophobic, ionic, and/or hydrogen-bond interactions, including interactions such as salt bridges and water bridges. Non-covalent binding interactions are generally characterized by a dissociation constant (K_{D}) of less than 10⁻⁶ M, less than 10⁻⁷ M, less than 10⁻⁸ M, less than 10⁻⁹ M, less than 10⁻¹⁰ M, less than 10⁻¹¹ M, less than 10⁻¹²M, less than 10⁻¹³ M, less than 10⁻¹⁴ M, or less than 10⁻¹⁵ M. “Affinity” refers to the strength of non-covalent binding, increased binding affinity being correlated with a lower K_{D}. “Specific binding” generally refers to binding with an affinity of at least about 10⁻⁷ M or greater, e.g., 5×10⁻⁷ M, 10⁻⁸ M, 5×10⁻⁸ M, 10⁻⁹ M, and greater. “Non-specific binding” generally refers to binding (e.g., the binding of a ligand to a moiety other than its designated binding site or receptor) with an affinity of less than about 10⁻⁷ M (e.g., binding with an affinity of 10⁻⁶ M, 10⁻⁵ M, 10⁻⁴ M). However, in some contexts, e.g., binding between a TCR and a peptide/MHC complex, “specific binding” can be in the range of from 1 μM to 100 μM, or from 100 μM to 1 mM. “Covalent binding” or “covalent bond,” as used herein, refers to the formation of one or more covalent chemical binds between two different molecules.

[0034] The terms “treatment”, “treating” and the like are used herein to generally mean obtaining a desired pharmacologic and/or physiologic effect. The effect may be prophylactic in terms of completely or partially preventing a disease or symptom thereof and/or may be therapeutic in terms of a partial or complete cure for a disease and/or adverse effect attributable to the disease. “Treatment” as used herein covers any treatment of a disease or symptom in a mammal, and includes: (a) preventing the disease or symptom from occurring in a subject which may be predisposed to acquiring the disease or symptom but has not yet been diagnosed as having it; (b) inhibiting the disease or symptom, i.e., arresting its development; and/or (c) relieving the disease, i.e., causing regression of the disease. The therapeutic agent may be administered before, during or after the onset of disease or injury. The treatment of ongoing disease, where the treatment stabilizes or reduces the undesirable clinical symptoms of the patient, is of particular interest. Such treatment is desirably performed prior to complete loss of function in the affected tissues. The subject therapy will desirably be administered during the symptomatic stage of the disease, and in some cases after the symptomatic stage of the disease.

[0035] The terms “individual,” “subject,” “host,” and “patient,” are used interchangeably herein and refer to any mammalian subject for whom diagnosis, treatment, or therapy is desired. Mammals include, e.g., humans, non-human primates, rodents (e.g., rats; mice), lagomorphs (e.g., rabbits), ungulates (e.g., cows, sheep, pigs, horses, goats, and the like), etc.

[0036] The terms “antibodies” and “immunoglobulin” include antibodies or immunoglobulins of any isotype, fragments of antibodies that retain specific binding to antigen, including, but not limited to, Fab, Fv, scFv, and Fd fragments, chimeric antibodies, humanized antibodies, single-chain antibodies (scAb), single domain antibodies (dAb), single domain heavy chain antibodies, a single domain light chain antibodies, nanobodies, bi-specific antibodies, multi-specific antibodies, and fusion proteins comprising an antigen-binding (also referred to herein as antigen binding) portion of an antibody and a non-antibody protein. The antibodies can be detectably labeled, e.g., with a radioisotope, an enzyme that generates a detectable product, a fluorescent protein, and the like. The antibodies can be further conjugated to other moieties, such as members of specific binding pairs, e.g., biotin (member of biotin-avidin specific binding pair), and the like. Also encompassed by the term are Fab′, Fv, F(ab′)₂, and or other antibody fragments that retain specific binding to antigen, and monoclonal antibodies. As used herein, a monoclonal antibody is an antibody produced by a group of identical cells, all of which were produced from a single cell by repetitive cellular replication. That is, the clone of cells only produces a single antibody species. While a monoclonal antibody can be produced using hybridoma production technology, other production methods known to those skilled in the art can also be used (e.g., antibodies derived from antibody phage display libraries). An antibody can be monovalent or bivalent. An antibody can be an Ig monomer, which is a “Y-shaped” molecule that consists of four polypeptide chains: two heavy chains and two light chains connected by disulfide bonds.

[0037] The term “humanized immunoglobulin” as used herein refers to an immunoglobulin comprising portions of immunoglobulins of different origin, wherein at least one portion comprises amino acid sequences of human origin. For example, the humanized antibody can comprise portions derived from an immunoglobulin of nonhuman origin with the requisite specificity, such as a mouse, and from immunoglobulin sequences of human origin (e.g., chimeric immunoglobulin), joined together chemically by conventional techniques (e.g., synthetic) or prepared as a contiguous polypeptide using genetic engineering techniques (e.g., DNA encoding the protein portions of the chimeric antibody can be expressed to produce a contiguous polypeptide chain). Another example of a humanized immunoglobulin is an immunoglobulin containing one or more immunoglobulin chains comprising a complementarity-determining region (CDR) derived from an antibody of nonhuman origin and a framework region derived from a light and/or heavy chain of human origin (e.g., CDR-grafted antibodies with or without framework changes). Chimeric or CDR-grafted single chain antibodies are also encompassed by the term humanized immunoglobulin. See, e.g., U.S. Pat. No. 4,816,567; European Patent No. 0,125,023 B1; U.S. Pat. No. 4,816,397; European Patent No. 0,120,694 B1; WO 86/01533; European Patent No. 0,194,276 B1; U.S. Pat. No. 5,225,539; European Patent No. 0,239,400 B1; and European Patent Application No. 0,519,596 A1. See also, U.S. Pat. Nos. 4,946,778; 5,476,786; and Bird et al. (1988) Science 242:423, regarding single chain antibodies.

[0038] The term “nanobody” (Nb), as used herein, refers to the smallest antigen binding fragment or single variable domain (V_{HH}) derived from naturally occurring heavy chain antibody and is known to the person skilled in the art. They are derived from heavy chain only antibodies, seen in camelids (Hamers-Casterman et al. (1993) Nature 363:446; Desmyter et al. (1996) Nature Structural Biol. 3:803; and Desmyter et al. (2015) Curr. Opin. Struct. Biol. 32:1). In the family of “camelids” immunoglobulins devoid of light polypeptide chains are found. “Camelids” comprise old world camelids (Camelus bactrianus and Camelus dromedarius) and new world camelids (for example, Llama paccos, Llama glama, Llama guanicoe and Llama vicugna). A single variable domain heavy chain antibody is referred to herein as a nanobody or a V_{HH} antibody.

[0039] “Antibody fragments” comprise a portion of an intact antibody, for example, the antigen binding or variable region of the intact antibody. Examples of antibody fragments include Fab, Fab′, F(ab′)₂, and Fv fragments; diabodies; linear antibodies (Zapata et al., Protein Eng. 8(10): 1057-1062 (1995)); domain antibodies (dAb; Holt et al. (2003) Trends Biotechnol. 21:484); single-chain antibody molecules; and multi-specific antibodies formed from antibody fragments. Papain digestion of antibodies produces two identical antigen-binding fragments, called “Fab” fragments, each with a single antigen-binding site, and a residual “Fc” fragment, a designation reflecting the ability to crystallize readily. Pepsin treatment yields an F(ab′)₂ fragment that has two antigen combining sites and is still capable of cross-linking antigen.

[0040] “Fv” is the minimum antibody fragment that contains a complete antigen-recognition and -binding site. This region consists of a dimer of one heavy- and one light-chain variable domain in tight, non-covalent association. It is in this configuration that the three CDRS of each variable domain interact to define an antigen-binding site on the surface of the VH-VL dimer. Collectively, the six CDRs confer antigen-binding specificity to the antibody. However, even a single variable domain (or half of an Fv comprising only three CDRs specific for an antigen) has the ability to recognize and bind antigen, although at a lower affinity than the entire binding site.

[0041] The “Fab” fragment also contains the constant domain of the light chain and the first constant domain (CH1) of the heavy chain. Fab fragments differ from Fab′ fragments by the addition of a few residues at the carboxyl terminus of the heavy chain CH1 domain including one or more cysteines from the antibody hinge region. Fab′-SH is the designation herein for Fab′ in which the cysteine residue(s) of the constant domains bear a free thiol group. F(ab′)2 antibody fragments originally were produced as pairs of Fab′ fragments which have hinge cysteines between them. Other chemical couplings of antibody fragments are also known.

[0042] The “light chains” of antibodies (immunoglobulins) from any vertebrate species can be assigned to one of two clearly distinct types, called kappa and lambda, based on the amino acid sequences of their constant domains. Depending on the amino acid sequence of the constant domain of their heavy chains, immunoglobulins can be assigned to different classes. There are five major classes of immunoglobulins: IgA, IgD, IgE, IgG, and IgM, and several of these classes can be further divided into subclasses (isotypes), e.g., IgG1, IgG2, IgG3, IgG4, IgA, and IgA2. The subclasses can be further divided into types, e.g., IgG2a and IgG2b.

[0043] “Single-chain Fv” or “sFv” or “scFv” antibody fragments comprise the V_{H} and V_{L} domains of antibody, wherein these domains are present in a single polypeptide chain. In some embodiments, the Fv polypeptide further comprises a polypeptide linker between the VH and VL domains, which enables the sFv to form the desired structure for antigen binding. For a review of sFv, see Pluckthun in The Pharmacology of Monoclonal Antibodies, vol. 113, Rosenburg and Moore eds., Springer-Verlag, New York, pp. 269-315 (1994).

[0044] The term “diabodies” refers to small antibody fragments with two antigen-binding sites, which fragments comprise a heavy-chain variable domain (VH) connected to a light-chain variable domain (VL) in the same polypeptide chain (V_{H}—V_{L}). By using a linker that is too short to allow pairing between the two domains on the same chain, the domains are forced to pair with the complementary domains of another chain and create two antigen-binding sites. Diabodies are described more fully in, for example, EP 404,097; WO 93/11161; and Hollinger et al. (1993) Proc. Natl. Acad. Sci. USA 90:6444-6448.

[0045] As used herein, the term “CDR” or “complementarity determining region” is intended to mean the non-contiguous antigen combining sites found within the variable region of both heavy and light chain polypeptides. CDRs have been described by Kabat et al (1977) J. Biol. Chem. 252:6609; Kabat et al., U.S. Dept. of Health and Human Services, “Sequences of proteins of immunological interest” (1991) (also referred to herein as Kabat 1991); by Chothia et al. (1987) J. Mol. Biol. 196:901 (also referred to herein as Chothia 1987); and MacCallum et al. (1996) J. Mol. Biol. 262:732, where the definitions include overlapping or subsets of amino acid residues when compared against each other. Nevertheless, application of either definition to refer to a CDR of an antibody or grafted antibodies or variants thereof is intended to be within the scope of the term as defined and used herein. The amino acid residues, which encompass the CDRs, as defined by each of the above cited references are set forth below in Table 2 as a comparison.

TABLE 2
CDR Definitions

| | Kabat¹ | Chothia² | MacCallum³ |
|---|---|---|---|
| V_{H} CDR-1 | 31-35 | 26-32 | 30-35 |
| V_{H} CDR-2 | 50-65 | 53-55 | 47-58 |
| V_{H} CDR-3 | 95-102 | 96-101 | 93-101 |
| V_{L} CDR-1 | 24-34 | 26-32 | 30-36 |
| V_{L} CDR-2 | 50-56 | 50-52 | 46-55 |
| V_{L} CDR-3 | 89-97 | 91-96 | 89-96 |

¹Residue numbering follows the nomenclature of Kabat et al., 1991, supra
²Residue numbering follows the nomenclature of Chothia et al., supra
³Residue numbering follows the nomenclature of MacCallum et al., supra

[0046] As used herein, the terms “CDR-L1”, “CDR-L2”, and “CDR-L3” refer, respectively, to the first, second, and third CDRs in a light chain variable region. As used herein, the terms “CDR-H1”, “CDR-H2”, and “CDR-H3” refer, respectively, to the first, second, and third CDRs in a heavy chain variable region. As used herein, the terms “CDR-1”, “CDR-2”, and “CDR-3” refer, respectively, to the first, second and third CDRs of either chain's variable region.

[0047] As used herein, the term “framework,” when used in reference to an antibody variable region, is intended to mean all amino acid residues outside the CDR regions within the variable region of an antibody. A variable region framework is generally a discontinuous amino acid sequence between about 100-120 amino acids in length but is intended to reference only those amino acids outside of the CDRs. As used herein, the term “framework region” is intended to mean each domain of the framework that is separated by the CDRs.

[0048] Before the present invention is further described, it is to be understood that this invention is not limited to particular embodiments described, as such may, of course, vary. It is also to be understood that the terminology used herein is for the purpose of describing particular embodiments only, and is not intended to be limiting, since the scope of the present invention will be limited only by the appended claims.

[0049] Where a range of values is provided, it is understood that each intervening value, to the tenth of the unit of the lower limit unless the context clearly dictates otherwise, between the upper and lower limit of that range and any other stated or intervening value in that stated range, is encompassed within the invention. The upper and lower limits of these smaller ranges may independently be included in the smaller ranges, and are also encompassed within the invention, subject to any specifically excluded limit in the stated range. Where the stated range includes one or both of the limits, ranges excluding either or both of those included limits are also included in the invention.

[0050] Unless defined otherwise, all technical and scientific terms used herein have the same meaning as commonly understood by one of ordinary skill in the art to which this invention belongs. Although any methods and materials similar or equivalent to those described herein can also be used in the practice or testing of the present invention, the preferred methods and materials are now described. All publications mentioned herein are incorporated herein by reference to disclose and describe the methods and/or materials in connection with which the publications are cited.

[0051] It must be noted that as used herein and in the appended claims, the singular forms “a,” “an,” and “the” include plural referents unless the context clearly dictates otherwise. Thus, for example, reference to a “T-cell modulatory multimeric polypeptide” includes a plurality of such polypeptides and reference to “the immunomodulatory polypeptide” includes reference to one or more immunomodulatory polypeptides and equivalents thereof known to those skilled in the art, and so forth. It is further noted that the claims may be drafted to exclude any optional element. As such, this statement is intended to serve as antecedent basis for use of such exclusive terminology as “solely,” “only” and the like in connection with the recitation of claim elements, or use of a “negative” limitation.

[0052] It is appreciated that certain features of the invention, which are, for clarity, described in the context of separate embodiments, may also be provided in combination in a single embodiment. Conversely, various features of the invention, which are, for brevity, described in the context of a single embodiment, may also be provided separately or in any suitable sub-combination. All combinations of the embodiments pertaining to the invention are specifically embraced by the present invention and are disclosed herein just as if each and every combination was individually and explicitly disclosed. In addition, all sub-combinations of the various embodiments and elements thereof are also specifically embraced by the present invention and are disclosed herein just as if each and every such sub-combination was individually and explicitly disclosed herein.

[0053] The publications discussed herein are provided solely for their disclosure prior to the filing date of the present application. Nothing herein is to be construed as an admission that the present invention is not entitled to antedate such publication by virtue of prior invention. Further, the dates of publication provided may be different from the actual publication dates which may need to be independently confirmed.

### DETAILED DESCRIPTION

[0054] The present disclosure provides T-cell modulatory multimeric polypeptides that comprise an immunomodulatory polypeptide and that comprise an epitope-presenting peptide. A TMMP is useful for modulating the activity of a T cell, and for modulating an immune response in an individual.

### T-Cell Modulatory Multimeric Polypeptides

[0055] The present disclosure provides a T-cell modulatory multimeric polypeptide (TMMP) comprising: a) a first polypeptide; and b) a second polypeptide, wherein the TMMP comprises a MUC1 peptide; a first major histocompatibility complex (MHC) polypeptide; a second MHC polypeptide; one or more immunomodulatory polypeptides; and optionally an immunoglobulin (Ig) Fc polypeptide or a non-Ig scaffold. As used herein, the term “MUC1 peptide” means a peptide having a length of at least 4 amino acids, e.g., from 4 amino acids to about 25 amino acids (e.g., 4 amino acids (aa), 5 aa, 6 aa, 7 aa, 8 aa, 9 aa, 10 aa, 11 aa, 12 aa, 13 aa, 14 aa, 15 aa, 16 aa, 17 aa, 18 aa, 19 aa, 20 aa, 21 aa, 22 aa, 23 aa, 24 aa, or 25 aa, including within a range of from 4 to 20 amino acids, from 6 to 18 amino acids, from 8 to 15 amino acids, from 8 to 12 amino acids, from 5 to 10 amino acids, from 10 to 20 amino acids, and from 15 to 25 amino acids in length) that present a MUC1 epitope to a T-cell receptor (TCR) when the MUC1 peptide is bound to an MHC complex. As used herein, the term “MUC1 epitope” means an epitope found on a MUC1 protein. As used herein, the terms “MUC1” and “MUC1 protein” are synonymous and mean a protein having an amino acid sequence of one of the following: (i) the mature MUC1 protein (discussed below); (ii) components of the mature MUC-1 protein, e.g., MUC1-N, MUC-1 C, and the extracellular region, transmembrane domain, and cytoplasmic tail of MUC1-C (all discussed below); and (iii) variants of (i) and (ii) that occur in human cancers, including, e.g., mutated forms, splice variants, isoforms, hypoglycosylated forms, cleaved forms, and the like. As used herein, the term “MUC1 polypeptide” means a polypeptide having a sequence of amino acids found in all or a part of a MUC1 protein, or where specified, a polypeptide having at least an 80% sequence identity to a sequence of amino acids found in all or a part of a MUC1 protein.

[0056] MUC1 (also known as tumor-associated epithelial membrane antigen, tumor-associated epithelial mucin, CD227 antigen, breast carcinoma-associated antigen DF3, peanut-reactive urinary mucin, polymorphic epithelial mucin, carcinoma-associated mucin, Krebs von den Lungen-6, episialin, PEM, H23Ag, EMA, MUC-1/SEC, ADMCKD1, MAM6, cancer antigen 15-3 (CA15-3), and MCA) is a polymorphic transmembrane glycoprotein expressed on the apical surfaces of simple and glandular epithelia. Nath and Mukherjee (2014) Trends Mol. Med. 20:332. The MUC1 gene encodes a single polypeptide chain precursor that includes a signal peptide sequence. Immediately after translation the signal peptide sequence is removed and the remaining portion of the MUC1 precursor is further cleaved into two peptide fragments: the longer N-terminal subunit (MUC1-N or MUC1a) and the shorter C-terminal subunit (MUC1-C or MUC16). The mature MUC1 comprises a MUC1-N and a MUC1-C associated through stable hydrogen bonds. MUC1-N, which is an extracellular domain, contains 25 to 125 variable number tandem repeats (VNTR) of 20 amino acid residues. MUC1-C contains a short extracellular region (approximately 53 amino acids), a transmembrane domain (approximately 28 amino acid), and a cytoplasmic tail (approximately 72 amino acids). The cytoplasmic tail of MUC1 (MUC1-CT) contains highly conserved serine and tyrosine residues that are phosphorylated by growth factor receptors and intracellular kinases. Human MUC1 exists in multiple isoforms resulting from different types of MUC1 RNA alternative splicing. The amino acid sequence of full length human MUC1 isoform 1 protein precursor (isoform 1, Uniprot P15941-1) is provided below. At least 16 other isoforms of human MUC-1 have been reported so far (Uniprot P15941-2 through P15941-17), which include various insertions, deletions, or substitutions as compared to the sequence of isoform 1. These isoforms are known as isoform 2, 3, 4, 5, 6, Y, 8, 9, F, Y-LSP, S2, M6, ZD, T10, E2, and J13 (Uniprot P15941-2 through P15941-17, respectively). The full length human MUC1 isoform 1 precursor protein consists of 1255 amino acids, which includes a signal peptide sequence at amino acids 1-23. The MUC1-N and MUC1-C domains of the mature MUC1 protein consist of amino acids 24-1097 and 1098-1255, respectively.

[0057] The present disclosure provides a TMMP, wherein the TMMP is a heterodimer comprising: a) a first polypeptide comprising a first MHC polypeptide; and b) a second polypeptide comprising a second MHC polypeptide, wherein the first polypeptide or the second polypeptide comprises a MUC1 peptide; wherein the first polypeptide and/or the second polypeptide comprises one or more immunomodulatory polypeptides that can be the same or different; and optionally an Ig F c polypeptide or a non-Ig scaffold. A TMMP of the present disclosure is also referred to herein as a “multimeric polypeptide of the present disclosure” or a “synTac.”

[0058] The present disclosure provides a TMMP comprising a heterodimeric polypeptide comprising: a) a first polypeptide comprising: i) a MUC1 peptide; and ii) a first MHC polypeptide; b) a second polypeptide comprising a second MHC polypeptide; and c) at least one immunomodulatory polypeptide, where the first and/or the second polypeptide comprises the at least one (i.e., one or more) immunomodulatory polypeptide. Optionally, the first or the second polypeptide comprises an Ig Fc polypeptide or a non-Ig scaffold. At least one of the one or more immunomodulatory polypeptides is a variant immunomodulatory polypeptide that exhibits reduced affinity to a cognate co-immunomodulatory polypeptide compared to the affinity of a corresponding wild-type immunomodulatory polypeptide for the cognate co-immunomodulatory polypeptide. The MUC1 peptide present in a TMMP of the present disclosure binds to a T-cell receptor (TCR) on a T cell with an affinity of at least 100 μM (e.g., at least 10 μM, at least 1 μM, at least 100 nM, at least 10 nM, or at least 1 nM). A TMMP of the present disclosure binds to a first T cell with an affinity that is at least 25% higher than the affinity with which the TMMP binds a second T cell, where the first T cell expresses on its surface the cognate co-immunomodulatory polypeptide and a TCR that binds the MUC1 peptide/MHC complex with an affinity of at least 100 μM, and where the second T cell expresses on its surface the cognate co-immunomodulatory polypeptide but does not express on its surface a TCR that binds the MUC1 peptide/MHC complex with an affinity of at least 100 μM (e.g., at least 10 μM, at least 1 μM, at least 100 nM, at least 10 nM, or at least 1 nM).

[0059] The present disclosure provides a TMMP, wherein the TMMP is:

[0060] A) a heterodimer comprising: a) a first polypeptide comprising a first MHC polypeptide; and b) a second polypeptide comprising a second MHC polypeptide, wherein the first polypeptide or the second polypeptide comprises a MUC1 peptide; wherein the first polypeptide and/or the second polypeptide comprises one or more immunomodulatory polypeptides that can be the same or different, and wherein at least one of the one or more immunomodulatory polypeptides may be a wild-type immunomodulatory polypeptide or a variant of a wild-type immunomodulatory polypeptide, wherein the variant immunomodulatory polypeptide comprises 1, 2, 3, 4, 5, 6, 7, 8, 9, 10, 11, 12, 13, 14, 15, 16, 17, 18, 19, or 20 amino acid substitutions compared to the amino acid sequence of the corresponding wild-type immunomodulatory polypeptide; and wherein the first polypeptide or the second polypeptide optionally comprises an Ig Fc polypeptide or a non-Ig scaffold; or

[0061] B) a heterodimer comprising: a) a first polypeptide comprising a first MHC polypeptide; and b) a second polypeptide comprising a second MHC polypeptide, wherein the first polypeptide or the second polypeptide comprises a MUC1 peptide; wherein the first polypeptide and/or the second polypeptide comprises one or more immunomodulatory polypeptides that can be the same or different,

[0062] wherein at least one of the one or more immunomodulatory polypeptides is a variant of a wild-type immunomodulatory polypeptide, wherein the variant immunomodulatory polypeptide comprises 1, 2, 3, 4, 5, 6, 7, 8, 9, 10, 11, 12, 13, 14, 15, 16, 17, 18, 19, or 20 amino acid substitutions compared to the amino acid sequence of the corresponding wild-type immunomodulatory polypeptide,

[0063] wherein at least one of the one or more immunomodulatory domains is a variant immunomodulatory polypeptide that exhibits reduced affinity to a cognate co-immunomodulatory polypeptide compared to the affinity of a corresponding wild-type immunomodulatory polypeptide for the cognate co-immunomodulatory polypeptide, and wherein the MUC1 peptide/MHC complex binds to a TCR on a T cell with an affinity of at least 10⁻⁷ M, such that: i) the TMMP polypeptide binds to a first T cell with an affinity that is at least 25% higher than the affinity with which the TMMP binds a second T cell, wherein the first T cell expresses on its surface the cognate co-immunomodulatory polypeptide and a TCR that binds the MUC1 peptide/MHC complex with an affinity of at least 10⁻⁷ M, and wherein the second T cell expresses on its surface the cognate co-immunomodulatory polypeptide but does not express on its surface a TCR that binds the MUC1 peptide/MHC complex with an affinity of at least 10⁻⁷ M; and/or ii) the ratio of the binding affinity of a control TMMP, wherein the control comprises a wild-type immunomodulatory polypeptide, to a cognate co-immunomodulatory polypeptide to the binding affinity of the TMMP comprising a variant of the wild-type immunomodulatory polypeptide to the cognate co-immunomodulatory polypeptide, when measured by bio-layer interferometry, is in a range of from 1.5:1 to 10⁶:1; and wherein the variant immunomodulatory polypeptide comprises 1, 2, 3, 4, 5, 6, 7, 8, 9, 10, 11, 12, 13, 14, 15, 16, 17, 18, 19, or 20 amino acid substitutions compared to the amino acid sequence of the corresponding wild-type immunomodulatory polypeptide; and

[0064] wherein the first polypeptide or the second polypeptide optionally comprises an Ig Fc polypeptide or a non-Ig scaffold; or

[0065] C) a heterodimer comprising: a) a first polypeptide comprising, in order from N-terminus to C-terminus: i) a MUC1 peptide; ii) a first MHC polypeptide; and b) a second polypeptide comprising, in order from N-terminus to C-terminus: i) a second MHC polypeptide; and ii) optionally an immunoglobulin (Ig) Fc polypeptide or a non-Ig scaffold, wherein the TMMP comprises one or more immunomodulatory domains that can be the same or different, wherein at least one of the one or more immunomodulatory domain is: A) at the C-terminus of the first polypeptide; B) at the N-terminus of the second polypeptide; C) at the C-terminus of the second polypeptide; or D) at the C-terminus of the first polypeptide and at the N-terminus of the second polypeptide, and wherein at least one of the one or more immunomodulatory domains may be a wild-type immunomodulatory polypeptide or a variant of a wild-type immunomodulatory polypeptide, wherein the variant immunomodulatory polypeptide comprises 1, 2, 3, 4, 5, 6, 7, 8, 9, 10, 11, 12, 13, 14, 15, 16, 17, 18, 19, or 20 amino acid substitutions compared to the amino acid sequence of the corresponding wild-type immunomodulatory polypeptide; and

[0066] optionally wherein at least one of the one or more immunomodulatory domains is a variant immunomodulatory polypeptide that exhibits reduced affinity to a cognate co-immunomodulatory polypeptide compared to the affinity of a corresponding wild-type immunomodulatory polypeptide for the cognate co-immunomodulatory polypeptide, and wherein the MUC1 peptide/MHC complex binds to a TCR on a T cell with an affinity of at least 10⁻⁷ M, such that: i) the TMMP binds to a first T cell with an affinity that is at least 25% higher than the affinity with which the TMMP binds a second T cell, wherein the first T cell expresses on its surface the cognate co-immunomodulatory polypeptide and a TCR that binds the MUC1 peptide/MHC complex with an affinity of at least 10⁻⁷ M, and wherein the second T cell expresses on its surface the cognate co-immunomodulatory polypeptide but does not express on its surface a TCR that binds the MUC1 peptide/MHC complex with an affinity of at least 10⁻⁷ M; and/or ii) the ratio of the binding affinity of a control TMMP, wherein the control comprises a wild-type immunomodulatory polypeptide, to a cognate co-immunomodulatory polypeptide to the binding affinity of the TMMP comprising a variant of the wild-type immunomodulatory polypeptide to the cognate co-immunomodulatory polypeptide, when measured by bio-layer interferometry, is in a range of from 1.5:1 to 10⁶:1; and wherein the variant immunomodulatory polypeptide comprises 1, 2, 3, 4, 5, 6, 7, 8, 9, 10, 11, 12, 13, 14, 15, 16, 17, 18, 19, or 20 amino acid substitutions compared to the amino acid sequence of the corresponding wild-type immunomodulatory polypeptide.

[0067] The present disclosure provides a TMMP comprising: a) a first polypeptide comprising, in order from N-terminus to C-terminus: i) a MUC1 peptide; ii) a first MHC polypeptide; and b) a second polypeptide comprising, in order from N-terminus to C-terminus: i) a second MHC polypeptide; and ii) optionally an Ig Fc polypeptide or a non-Ig scaffold. A TMMP of the present disclosure comprises one or more immunomodulatory polypeptides, wherein at least one of the one or more immunomodulatory polypeptides is: A) at the C-terminus of the first polypeptide; B) at the N-terminus of the second polypeptide; C) at the C-terminus of the second polypeptide; or D) at the C-terminus of the first polypeptide and at the N-terminus of the second polypeptide. At least one of the one or more immunomodulatory polypeptides is a variant immunomodulatory polypeptide that exhibits reduced affinity to a cognate co-immunomodulatory polypeptide compared to the affinity of a corresponding wild-type immunomodulatory polypeptide for the cognate co-immunomodulatory polypeptide. The MUC1 peptide/MHC complex present in a TMMP of the present disclosure binds to a T-cell receptor (TCR) on a T cell with an affinity of at least 100 μM (e.g., at least 10 μM, at least 1 μM, at least 100 nM, at least 10 nM, or at least 1 nM). A TMMP of the present disclosure binds to a first T cell with an affinity that is at least 25% higher than the affinity with which the TMMP binds a second T cell, where the first T cell expresses on its surface the cognate co-immunomodulatory polypeptide and a TCR that binds the MUC1 peptide/MHC complex with an affinity of at least 100 μM, and where the second T cell expresses on its surface the cognate co-immunomodulatory polypeptide but does not express on its surface a TCR that binds the MUC1 peptide/MHC complex with an affinity of at least 100 μM (e.g., at least 10 μM, at least 1 μM, at least 100 nM, at least 10 nM, or at least 1 nM).

[0068] In some cases, the MUC1 peptide/MHC complex present in a TMMP of the present disclosure binds to a TCR on a T cell with an affinity of from about 10⁻⁴ M to about 5×10⁻⁴ M, from about 5×10⁻⁴ M to about 10⁻⁵ M, from about 10⁻⁵ M to 5×10⁻⁵ M, from about 5×10⁻⁵ M to 10⁻⁶ M, from about 10⁻⁶ M to about 5×10⁻⁶ M, from about 5×10⁻⁶ M to about 10⁻⁷ M, from about 10⁻⁷ M to about 5×10⁻⁷ M, from about 5×10⁻⁷ M to about 10⁻⁸ M, or from about 10⁻⁸ M to about 10⁻⁹ M. Expressed another way, in some cases, the MUC1 peptide/MHC complex present in a TMMP of the present disclosure binds to a TCR on a T cell with an affinity of from about 1 nM to about 5 nM, from about 5 nM to about 10 nM, from about 10 nM to about 50 nM, from about 50 nM to about 100 nM, from about 0.1 μM to about 0.5 μM, from about 0.5 μM to about 1 μM, from about 1 μM to about 5 μM, from about 5 μM to about 10 μM, from about 10 μM to about 25 μM, from about 25 μM to about 50 μM, from about 50 μM to about 75 μM, from about 75 μM to about 100 μM.

[0069] In some cases, an immunomodulatory polypeptide present in a TMMP of the present disclosure binds to its cognate co-immunomodulatory polypeptide with an affinity that it at least 10% less, at least 15% less, at least 20% less, at least 25% less, at least 30% less, at least 35% less, at least 40% less, at least 45% less, at least 50% less, at least 55% less, at least 60% less, at least 65% less, at least 70% less, at least 75% less, at least 80% less, at least 85% less, at least 90% less, at least 95% less, or more than 95% less, than the affinity of a corresponding wild-type immunomodulatory polypeptide for the cognate co-immunomodulatory polypeptide.

[0070] In some cases, a variant immunomodulatory polypeptide present in a TMMP of the present disclosure has a binding affinity for a cognate co-immunomodulatory polypeptide that is from 1 nM to 100 nM, or from 100 nM to 100 μM. For example, in some cases, a variant immunomodulatory polypeptide present in a TMMP of the present disclosure has a binding affinity for a cognate co-immunomodulatory polypeptide that is from about 100 nM to 150 nM, from about 150 nM to about 200 nM, from about 200 nM to about 250 nM, from about 250 nM to about 300 nM, from about 300 nM to about 350 nM, from about 350 nM to about 400 nM, from about 400 nM to about 500 nM, from about 500 nM to about 600 nM, from about 600 nM to about 700 nM, from about 700 nM to about 800 nM, from about 800 nM to about 900 nM, from about 900 nM to about 1 μM, to about 1 μM to about 5 μM, from about 5 μM to about 10 μM, from about 10 μM to about 15 μM, from about 15 μM to about 20 μM, from about 20 μM to about 25 μM, from about 25 μM to about 50 μM, from about 50 μM to about 75 μM, or from about 75 μM to about 100 μM. In some cases, a variant immunomodulatory polypeptide present in a TMMP of the present disclosure has a binding affinity for a cognate co-immunomodulatory polypeptide that is from about 1 nM to about 5 nM, from about 5 nM to about 10 nM, from about 10 nM to about 50 nM, from about 50 nM to about 100 nM.

[0071] The combination of the reduced affinity of the immunomodulatory polypeptide for its cognate co-immunomodulatory polypeptide, and the affinity of the MUC1 peptide for a TCR, provides for enhanced selectivity of a TMMP of the present disclosure. For example, a TMMP of the present disclosure binds selectively to a first T cell that displays both: i) a TCR specific for the MUC1 peptide present in the TMMP; and ii) a co-immunomodulatory polypeptide that binds to the immunomodulatory polypeptide present in the TMMP, compared to binding to a second T cell that displays: i) a TCR specific for an epitope other than the epitope present in the TMMP; and ii) a co-immunomodulatory polypeptide that binds to the immunomodulatory polypeptide present in the TMMP. For example, a TMMP of the present disclosure binds to the first T cell with an affinity that is at least 10%, at least 15%, at least 20%, at least 25%, at least 30%, at least 40%, at least 50%, at least 60%, at least 70%, at least 80%, at least 90%, at least 2-fold, at least 2.5-fold, at least 5-fold, at least 10-fold, at least 15-fold, at least 20-fold, at least 25-fold, at least 50-fold, at least 100-fold, or more than 100-fold, higher than the affinity to which it binds the second T cell.

[0072] In some cases, a TMMP of the present disclosure, when administered to an individual in need thereof, induces both an epitope-specific T cell response and an epitope non-specific T cell response. In other words, in some cases, a TMMP of the present disclosure, when administered to an individual in need thereof, induces an epitope-specific T cell response by modulating the activity of a first T cell that displays both: i) a TCR specific for the MUC1 epitope present in the TMMP; ii) a co-immunomodulatory polypeptide that binds to the immunomodulatory polypeptide present in the TMMP; and induces an epitope non-specific T cell response by modulating the activity of a second T cell that displays: i) a TCR specific for an epitope other than the MUC1 epitope present in the TMMP; and ii) a co-immunomodulatory polypeptide that binds to the immunomodulatory polypeptide present in the TMMP. The ratio of the epitope-specific T cell response to the epitope-non-specific T cell response is at least 2:1, at least 5:1, at least 10:1, at least 15:1, at least 20:1, at least 25:1, at least 50:1, or at least 100:1. The ratio of the epitope-specific T cell response to the epitope-non-specific T cell response is from about 2:1 to about 5:1, from about 5:1 to about 10:1, from about 10:1 to about 15:1, from about 15:1 to about 20:1, from about 20:1 to about 25:1, from about 25:1 to about 50:1, or from about 50:1 to about 100:1, or more than 100:1. “Modulating the activity” of a T cell can include one or more of: i) activating a cytotoxic (e.g., CD8⁺) T cell; ii) inducing cytotoxic activity of a cytotoxic (e.g., CD8⁺) T cell; iii) inducing production and release of a cytotoxin (e.g., a perforin; a granzyme; a granulysin) by a cytotoxic (e.g., CD8⁺) T cell; iv) inhibiting activity of an autoreactive T cell; and the like.

[0073] The combination of the reduced affinity of the immunomodulatory polypeptide for its cognate co-immunomodulatory polypeptide, and the affinity of the MUC1 epitope for a TCR, provides for enhanced selectivity of a TMMP of the present disclosure. Thus, for example, a TMMP of the present disclosure binds with higher avidity to a first T cell that displays both: i) a TCR specific for the MUC1 epitope present in the TMMP; and ii) a co-immunomodulatory polypeptide that binds to the immunomodulatory polypeptide present in the TMMP, compared to the avidity to which it binds to a second T cell that displays: i) a TCR specific for an epitope other than the epitope present in the TMMP; and ii) a co-immunomodulatory polypeptide that binds to the immunomodulatory polypeptide present in the TMMP.

[0074] Binding affinity between an immunomodulatory polypeptide and its cognate co-immunomodulatory polypeptide can be determined by bio-layer interferometry (BLI) using purified immunomodulatory polypeptide and purified cognate co-immunomodulatory polypeptide. Binding affinity between a TMMP and its cognate co-immunomodulatory polypeptide can be determined by BLI using purified TMMP and the cognate co-immunomodulatory polypeptide. BLI methods are well known to those skilled in the art. See, e.g., Lad et al. (2015) J. Biomol. Screen. 20(4):498-507; and Shah and Duncan (2014) J. Vis. Exp. 18:e51383.

[0075] A BLI assay can be carried out using an Octet RED 96 (Pal FortéBio) instrument, or a similar instrument, as follows. A TMMP (e.g., a TMMP of the present disclosure; a control TMMP (where a control TMMP comprises a wild-type immunomodulatory polypeptide)) is immobilized onto an insoluble support (a “biosensor”). The immobilized TMMP is the “target.” Immobilization can be effected by immobilizing a capture antibody onto the insoluble support, where the capture antibody immobilizes the TMMP. For example, immobilization can be effected by immobilizing anti-Fc (e.g., anti-human IgG Fc) antibodies onto the insoluble support, where the immobilized anti-Fc antibodies bind to and immobilize the TMMP (where the TMMP comprises an IgFc polypeptide). A co-immunomodulatory polypeptide is applied, at several different concentrations, to the immobilized TMMP, and the instrument's response recorded. Assays are conducted in a liquid medium comprising 25 mM HEPES pH 6.8, 5% poly(ethylene glycol) 6000, 50 mM KCl, 0.1% bovine serum albumin, and 0.02% Tween 20 nonionic detergent. Binding of the co-immunomodulatory polypeptide to the immobilized TMMP is conducted at 30° C. As a positive control for binding affinity, an anti-MHC Class I monoclonal antibody can be used. For example, anti-HLA Class I monoclonal antibody W6/32 (American Type Culture Collection No. HB-95; Parham et al. (1979) J. Immunol. 123:342), which has a K_{D} of 7 nM, can be used. A standard curve can be generated using serial dilutions of the anti-MHC Class I monoclonal antibody. The co-immunomodulatory polypeptide, or the anti-MHC Class I mAb, is the “analyte.” BLI analyzes the interference pattern of white light reflected from two surfaces: i) from the immobilized polypeptide (“target”); and ii) an internal reference layer. A change in the number of molecules (“analyte”; e.g., co-immunomodulatory polypeptide; anti-HLA antibody) bound to the biosensor tip causes a shift in the interference pattern; this shift in interference pattern can be measured in real time. The two kinetic terms that describe the affinity of the target/analyte interaction are the association constant (kₐ) and dissociation constant (k_{d}). The ratio of these two terms (k_{d}/ₐ) gives rise to the affinity constant K_{D}.

[0076] The BLI assay is carried out in a multi-well plate. To run the assay, the plate layout is defined, the assay steps are defined, and biosensors are assigned in Octet Data Acquisition software. The biosensor assembly is hydrated. The hydrated biosensor assembly and the assay plate are equilibrated for 10 minutes on the Octet instrument. Once the data are acquired, the acquired data are loaded into the Octet Data Analysis software. The data are processed in the Processing window by specifying method for reference subtraction, y-axis alignment, inter-step correction, and Savitzky-Golay filtering. Data are analyzed in the Analysis window by specifying steps to analyze (Association and Dissociation), selecting curve fit model (1:1), fitting method (global), and window of interest (in seconds). The quality of fit is evaluated. K_{D} values for each data trace (analyte concentration) can be averaged if within a 3-fold range. K_{D} error values should be within one order of magnitude of the affinity constant values; R² values should be above 0.95. See, e.g., Abdiche et al. (2008) J. Anal. Biochem. 377:209.

[0077] Unless otherwise stated herein, the affinity of a TMMP of the present disclosure for a cognate co-immunomodulatory polypeptide, or the affinity of a control TMMP (where a control TMMP comprises a wild-type immunomodulatory polypeptide) for a cognate co-immunomodulatory polypeptide, is determined using BLI, as described above.

[0078] In some cases, the ratio of: i) the binding affinity of a control TMMP (where the control comprises a wild-type immunomodulatory polypeptide) to a cognate co-immunomodulatory polypeptide to ii) the binding affinity of a TMMP of the present disclosure comprising a variant of the wild-type immunomodulatory polypeptide to the cognate co-immunomodulatory polypeptide, when measured by BLI (as described above), is at least 1.5:1, at least 2:1, at least 5:1, at least 10:1, at least 15:1, at least 20:1, at least 25:1, at least 50:1, at least 100:1, at least 500:1, at least 10²:1, at least 5×10²:1, at least 10³:1, at least 5×10³:1, at least 10⁴:1, at least 10⁵:1, or at least 10⁶:1. In some cases, the ratio of: i) the binding affinity of a control TMMP (where the control comprises a wild-type immunomodulatory polypeptide) to a cognate co-immunomodulatory polypeptide to ii) the binding affinity of a TMMP of the present disclosure comprising a variant of the wild-type immunomodulatory polypeptide to the cognate co-immunomodulatory polypeptide, when measured by BLI, is in a range of from 1.5:1 to 10⁶:1, e.g., from 1.5:1 to 10:1, from 10:1 to 50:1, from 50:1 to 10²:1, from 10²:1 to 10³:1, from 10³:1 to 10⁴:1, from 10⁴:1 to 10⁵:1, or from 10⁵:1 to 10⁶:1.

[0079] As an example, where a control TMMP comprises a wild-type IL-2 polypeptide, and where a TMMP of the present disclosure comprises a variant IL-2 polypeptide (comprising from 1 to 10 amino acid substitutions relative to the amino acid sequence of the wild-type IL-2 polypeptide) as the immunomodulatory polypeptide, the ratio of: i) the binding affinity of the control TMMP to an IL-2 receptor (i.e., the cognate co-immunomodulatory polypeptide) to ii) the binding affinity of the TMMP of the present disclosure to the IL-2 receptor, when measured by BLI, is at least 1.5:1, at least 2:1, at least 5:1, at least 10:1, at least 15:1, at least 20:1, at least 25:1, at least 50:1, at least 100:1, at least 500:1, at least 10²:1, at least 5×10²:1, at least 10³:1, at least 5×10³:1, at least 10⁴:1, at least 10⁵:1, or at least 10⁶:1. In some cases, where a control TMMP comprises a wild-type IL-2 polypeptide, and where a TMMP of the present disclosure comprises a variant IL-2 polypeptide (comprising from 1 to 10 amino acid substitutions relative to the amino acid sequence of the wild-type IL-2 polypeptide) as the immunomodulatory polypeptide, the ratio of: i) the binding affinity of the control TMMP to an IL-2 receptor (i.e., the cognate co-immunomodulatory polypeptide) to ii) the binding affinity of the TMMP of the present disclosure to the IL-2 receptor, when measured by BLI, is in a range of from 1.5:1 to 10⁶:1, e.g., from 1.5:1 to 10:1, from 10:1 to 50:1, from 50:1 to 10²:1, from 10²:1 to 10³:1, from 10³:1 to 10⁴:1, from 10⁴:1 to 10⁵:1, or from 10⁵:1 to 10⁶:1.

[0080] As another example, where a control TMMP comprises a wild-type PD-L1 polypeptide, and where a TMMP of the present disclosure comprises a variant PD-L1 polypeptide (comprising from 1 to 10 amino acid substitutions relative to the amino acid sequence of the wild-type PD-L1 polypeptide) as the immunomodulatory polypeptide, the ratio of: i) the binding affinity of the control TMMP to a PD-1 polypeptide (i.e., the cognate co-immunomodulatory polypeptide) to ii) the binding affinity of the TMMP of the present disclosure to the PD-1 polypeptide, when measured by BLI, is at least 1.5:1, at least 2:1, at least 5:1, at least 10:1, at least 15:1, at least 20:1, at least 25:1, at least 50:1, at least 100:1, at least 500:1, at least 10²:1, at least 5×10²:1, at least 10³:1, at least 5×10³:1, at least 10⁴:1, at least 10⁵:1, or at least 10⁶:1.

[0081] As another example, where a control TMMP comprises a wild-type CD80 polypeptide, and where a TMMP of the present disclosure comprises a variant CD80 polypeptide (comprising from 1 to 10 amino acid substitutions relative to the amino acid sequence of the wild-type CD80 polypeptide) as the immunomodulatory polypeptide, the ratio of: i) the binding affinity of the control TMMP to a CTLA4 polypeptide (i.e., the cognate co-immunomodulatory polypeptide) to ii) the binding affinity of the TMMP of the present disclosure to the CTLA4 polypeptide, when measured by BLI, is at least 1.5:1, at least 2:1, at least 5:1, at least 10:1, at least 15:1, at least 20:1, at least 25:1, at least 50:1, at least 100:1, at least 500:1, at least 10²:1, at least 5×10²:1, at least 10³:1, at least 5×10³:1, at least 10⁴:1, at least 10⁵:1, or at least 10⁶:1.

[0082] As another example, where a control TMMP comprises a wild-type CD80 polypeptide, and where a TMMP of the present disclosure comprises a variant CD80 polypeptide (comprising from 1 to 10 amino acid substitutions relative to the amino acid sequence of the wild-type CD80 polypeptide) as the immunomodulatory polypeptide, the ratio of: i) the binding affinity of the control TMMP to a CD28 polypeptide (i.e., the cognate co-immunomodulatory polypeptide) to ii) the binding affinity of the TMMP of the present disclosure to the CD28 polypeptide, when measured by BLI, is at least 1.5:1, at least 2:1, at least 5:1, at least 10:1, at least 15:1, at least 20:1, at least 25:1, at least 50:1, at least 100:1, at least 500:1, at least 10²:1, at least 5×10²:1, at least 10³:1, at least 5×10³:1, at least 10⁴:1, at least 10⁵:1, or at least 10⁶:1.

[0083] As another example, where a control TMMP comprises a wild-type 4-1BBL polypeptide, and where a TMMP of the present disclosure comprises a variant 4-1BBL polypeptide (comprising from 1 to 10 amino acid substitutions relative to the amino acid sequence of the wild-type 4-1BBL polypeptide) as the immunomodulatory polypeptide, the ratio of: i) the binding affinity of the control TMMP to a 4-1BB polypeptide (i.e., the cognate co-immunomodulatory polypeptide) to ii) the binding affinity of the TMMP of the present disclosure to the 4-1BB polypeptide, when measured by BLI, is at least 1.5:1, at least 2:1, at least 5:1, at least 10:1, at least 15:1, at least 20:1, at least 25:1, at least 50:1, at least 100:1, at least 500:1, at least 10²:1, at least 5×10²:1, at least 10³:1, at least 5×10³:1, at least 10⁴:1, at least 10⁵:1, or at least 10⁶:1.

[0084] As another example, where a control TMMP comprises a wild-type CD86 polypeptide, and where a TMMP of the present disclosure comprises a variant CD86 polypeptide (comprising from 1 to 10 amino acid substitutions relative to the amino acid sequence of the wild-type CD86 polypeptide) as the immunomodulatory polypeptide, the ratio of: i) the binding affinity of the control TMMP to a CD28 polypeptide (i.e., the cognate co-immunomodulatory polypeptide) to ii) the binding affinity of the TMMP of the present disclosure to the CD28 polypeptide, when measured by BLI, is at least 1.5:1, at least 2:1, at least 5:1, at least 10:1, at least 15:1, at least 20:1, at least 25:1, at least 50:1, at least 100:1, at least 500:1, at least 10²:1, at least 5×10²:1, at least 10³:1, at least 5×10³:1, at least 10⁴:1, at least 10⁵:1, or at least 10⁶:1.

[0085] Binding affinity of a TMMP of the present disclosure to a target T cell can be measured in the following manner: A) contacting a TMMP of the present disclosure with a target T-cell expressing on its surface: i) a cognate co-immunomodulatory polypeptide that binds the parental wild-type immunomodulatory polypeptide; and ii) a T-cell receptor that binds to the epitope, where the TMMP comprises an epitope tag, such that the TMMP binds to the target T-cell; B) contacting the target T-cell-bound TMMP with a fluorescently labeled binding agent (e.g., a fluorescently labeled antibody) that binds to the epitope tag, generating a TMMP/target T-cell/binding agent complex; C) measuring the mean fluorescence intensity (MFI) of the TMMP/target T-cell/binding agent complex using flow cytometry. The epitope tag can be, e.g., a FLAG tag, a hemagglutinin tag, a c-myc tag, a poly(histidine) tag, etc. The MFI measured over a range of concentrations of the TMMP library member provides a measure of the affinity. The MFI measured over a range of concentrations of the TMMP library member provides a half maximal effective concentration (EC₅₀) of the TMMP. In some cases, the EC₅₀ of a TMMP of the present disclosure for a target T cell is in the nM range; and the EC₅₀ of the TMMP for a control T cell (where a control T cell expresses on its surface: i) a cognate co-immunomodulatory polypeptide that binds the parental wild-type immunomodulatory polypeptide; and ii) a T-cell receptor that does not bind to the epitope present in the TMMP) is in the M range. In some cases, the ratio of the EC₅₀ of a TMMP of the present disclosure for a control T cell to the EC₅₀ of the TMMP for a target T cell is at least 1.5:1, at least 2:1, at least 5:1, at least 10:1, at least 15:1, at least 20:1, at least 25:1, at least 50:1, at least 100:1, at least 500:1, at least 10²:1, at least 5×10²:1, at least 10³:1, at least 5×10³:1, at least 10⁴:1, at lease 10⁵:1, or at least 10⁶:1. The ratio of the EC₅₀ of a TMMP of the present disclosure for a control T cell to the EC₅₀ of the TMMP for a target T cell is an expression of the selectivity of the TMMP.

[0086] In some cases, when measured as described in the preceding paragraph, a TMMP of the present disclosure exhibits selective binding to target T-cell, compared to binding of the TMMP library member to a control T cell that comprises: i) the cognate co-immunomodulatory polypeptide that binds the parental wild-type immunomodulatory polypeptide; and ii) a T-cell receptor that binds to an epitope other than the epitope present in the TMMP library member.

### Dimerized TMMPs

[0087] A TMMP of the present disclosure can be dimerized; i.e., the present disclosure provides a multimeric polypeptide comprising a dimer of a TMMP of the present disclosure. Thus, the present disclosure provides a TMMP comprising: A) a first heterodimer comprising: a) a first polypeptide comprising: i) a MUC1 peptide; and ii) a first major histocompatibility complex (MHC) polypeptide; and b) a second polypeptide comprising: i) a second MHC polypeptide, wherein the first heterodimer comprises one or more immunomodulatory polypeptides; and B) a second heterodimer comprising: a) a first polypeptide comprising: i) a MUC1 peptide; and ii) a first MHC polypeptide; and b) a second polypeptide comprising: i) a second MHC polypeptide, wherein the second heterodimer comprises one or more immunomodulatory polypeptides, and wherein the first heterodimer and the second heterodimer are covalently linked to one another. In some cases, the two TMMPs are identical to one another in amino acid sequence. In some cases, the first heterodimer and the second heterodimer are covalently linked to one another via a C-terminal region of the second polypeptide of the first heterodimer and a C-terminal region of the second polypeptide of the second heterodimer. In some cases, first heterodimer and the second heterodimer are covalently linked to one another via the C-terminal amino acid of the second polypeptide of the first heterodimer and the C-terminal region of the second polypeptide of the second heterodimer; for example, in some cases, the C-terminal amino acid of the second polypeptide of the first heterodimer and the C-terminal region of the second polypeptide of the second heterodimer are linked to one another, either directly or via a linker. The linker can be a peptide linker. The peptide linker can have a length of from 1 amino acid to 200 amino acids (e.g., from 1 amino acid (aa) to 5 aa, from 5 aa to 10 aa, from 10 aa to 25 aa, from 25 aa to 50 aa, from 50 aa to 100 aa, from 100 aa to 150 aa, or from 150 aa to 200 aa). In some cases, the peptide epitope of the first heterodimer and the peptide epitope of the second heterodimer comprise the same amino acid sequence. In some cases, the first MHC polypeptide of the first and the second heterodimer is an MHC Class I β2-microglobulin, and wherein the second MHC polypeptide of the first and the second heterodimer is an MHC Class I heavy chain. In some cases, the immunomodulatory polypeptide of the first heterodimer and the immunomodulatory polypeptide of the second heterodimer comprise the same amino acid sequence. In some cases, the immunomodulatory polypeptide of the first heterodimer and the immunomodulatory polypeptide of the second heterodimer are variant immunomodulatory polypeptides that comprise from 1 to 10 amino acid substitutions compared to a corresponding parental wild-type immunomodulatory polypeptide, and wherein the from 1 to 10 amino acid substitutions result in reduced affinity binding of the variant immunomodulatory polypeptide to a cognate co-immunomodulatory polypeptide. In some cases, the immunomodulatory polypeptide of the first heterodimer and the immunomodulatory polypeptide of the second heterodimer are each independently selected from the group consisting of IL-2, 4-1BBL, PD-L1, CD80, CD86, ICOS-L, OX-40L, FasL, JAG1 (CD339), TGFβ, CD70, and ICAM. Examples, of suitable MHC polypeptides, immunomodulatory polypeptides, and peptide epitopes are described below.

### MHC Polypeptides

[0088] As noted above, a TMMP of the present disclosure includes MHC polypeptides. For the purposes of the instant disclosure, the term “major histocompatibility complex (MHC) polypeptides” is meant to include MHC polypeptides of various species, including human MHC (also referred to as human leukocyte antigen (HLA)) polypeptides, rodent (e.g., mouse, rat, etc.) MHC polypeptides, and MHC polypeptides of other mammalian species (e.g., lagomorphs, non-human primates, canines, felines, ungulates (e.g., equines, bovines, ovines, caprines, etc.), and the like. The term “MHC polypeptide” is meant to include Class I MHC polypeptides (e.g., β-2 microglobulin and MHC class I heavy chain).

[0089] In some cases, the first MHC polypeptide is an MHC Class I β2M (β2M) polypeptide, and the second MHC polypeptide is an MHC Class I heavy chain (H chain) (“MHC-H”)). In other instances, the first MHC polypeptide is an MHC Class I heavy chain polypeptide; and the second MHC polypeptide is a β2M polypeptide. In some cases, both the β2M and MHC-H chain are of human origin; i.e., the MHC-H chain is an HLA heavy chain, or a variant thereof. Unless expressly stated otherwise, a TMMP of the present disclosure does not include membrane anchoring domains (transmembrane regions) of an MHC Class I heavy chain, or a part of MHC Class I heavy chain sufficient to anchor the resulting TMMP to a cell (e.g., eukaryotic cell such as a mammalian cell) in which it is expressed. In some cases, the MHC Class I heavy chain present in a TMMP of the present disclosure does not include a signal peptide, a transmembrane domain, or an intracellular domain (cytoplasmic tail) associated with a native MHC Class I heavy chain. Thus, e.g., in some cases, the MHC Class I heavy chain present in a TMMP of the present disclosure includes only the α1, α2, and α3 domains of an MHC Class I heavy chain. In some cases, the MHC Class I heavy chain present in a TMMP of the present disclosure has a length of from about 270 amino acids (aa) to about 290 aa. In some cases, the MHC Class I heavy chain present in a TMMP of the present disclosure has a length of 270 aa, 271 aa, 272 aa, 273 aa, 274 aa, 275 aa, 276 aa, 277 aa, 278 aa, 279 aa, 280 aa, 281 aa, 282 aa, 283 aa, 284 aa, 285 aa, 286 aa, 287 aa, 288 aa, 289 aa, or 290 aa.

[0090] In some cases, an MHC polypeptide of a TMMP is a human MHC polypeptide, where human MHC polypeptides are also referred to as “human leukocyte antigen” (“HLA”) polypeptides. In some cases, an MHC polypeptide of a TMMP is a Class I HLA polypeptide, e.g., a β2-microglobulin polypeptide, or a Class I HLA heavy chain polypeptide. Class I HLA heavy chain polypeptides include HLA-A heavy chain polypeptides, HLA-B heavy chain polypeptides, HLA-C heavy chain polypeptides, HLA-E heavy chain polypeptides, HLA-F heavy chain polypeptides, and HLA-G heavy chain polypeptides.

### MHC Class I Heavy Chains

[0091] In some cases, an MHC Class I heavy chain polypeptide present in a TMMP of the present disclosure comprises an amino acid sequence having at least 75%, at least 80%, at least 85%, at least 90%, at least 95%, at least 98%, at least 99%, or 100%, amino acid sequence identity to all or part (e.g., 50, 75, 100, 150, 200, or 250 contiguous amino acids) of the amino acid sequence of any of the human HLA heavy chain polypeptides depicted in FIGS. 7-13. In some cases, the MHC Class I heavy chain has a length of 270 aa, 271 aa, 272 aa, 273 aa, 274 aa, 275 aa, 276 aa, 277 aa, 278 aa, 279 aa, 280 aa, 281 aa, 282 aa, 283 aa, 284 aa, 285 aa, 286 aa, 287 aa, 288 aa, 289 aa, or 290 aa. In some cases, an MHC Class I heavy chain polypeptide present in a TMMP of the present disclosure comprises 1-30, 1-5, 5-10, 10-15, 15-20, 20-25 or 25-30 amino acid insertions, deletions, and/or substitutions (in addition to those locations indicated as being variable in the heavy chain consensus sequences) of any one of the amino acid sequences depicted in FIGS. 7-13. In some cases, the MHC Class I heavy chain does not include transmembrane or cytoplasmic domains. As an example, a MHC Class I heavy chain polypeptide of a TMMP of the present disclosure can comprise an amino acid sequence having at least 75%, at least 80%, at least 85%, at least 90%, at least 95%, at least 98%, at least 99%, or 100%, amino acid sequence identity to amino acids 25-300 (lacking all, or substantially all, of the leader, transmembrane and cytoplasmic sequence) or amino acids 25-365 (lacking the leader) of a human HLA-A heavy chain polypeptides depicted in any one of FIGS. 5A, 5B, and 5C.

[0092] FIGS. 5A, 5B and 5C provide amino acid sequences of human leukocyte antigen (HLA) Class I heavy chain polypeptides. Signal sequences, amino acids 1-24, are bolded and underlined. FIG. 5A entry: 3A.1 is the HLA-A heavy chain (HLA-A*01:01:01:01 or A*0101) (NCBI accession NP_001229687.1), SEQ ID NO: 35; entry 3A.2 is from HLA-A*1101 SEQ ID NO: 36; entry 3A.3 is from HLA-A*2402 SEQ ID NO: 37 and entry 3A.4 is from HLA-A*3303 SEQ ID NO: 38. FIG. 5B provides the sequence HLA-B*07:02:01 (HLA-B*0702) NCBI GenBank Accession NP_005505.2 (see also GenBank Accession AUV50118.1.). FIG. 5C provides the sequence HLA-C*0701 (GenBank Accession NP_001229971.1) (HLA-C*07:01:01:01 or HLA-Cw*070101, HLA-Cw*07 see GenBank Accession CAO78194.1).

[0093] FIG. 6 provides an alignment of eleven mature MHC class I heavy chain amino acid sequences without their leader sequences or transmembrane domains or intracellular domains. The aligned sequences are human HLA-A, HLA-B, and HLA-C, a mouse H2K protein sequence, three variants of HLA-A (var. 1, var. 2C, and var. 2CP), and 3 human HLA-A variants (HLA-A*1101; HLA-A*2402; and HLA-A*3303). Indicated in the alignment are the locations (84 and 139 of the mature proteins) where cysteine residues may be introduced (e.g., by substitution) for the formation of a disulfide bond to stabilize the MHC H chain—β2M complex. Also shown in the alignment is position 236 (of the mature polypeptide), which may be substituted by a cysteine residue that can form an inter-chain disulfide bond with β2M (e.g., at aa 12). An arrow appears above each of those locations and the residues are bolded. The seventh HLA-A sequence shown in the alignment (var. 2c), shows the sequence of variant 2 substituted with C residues at positions 84, 139 and 236. The boxes flanking residues 84, 139 and 236 show the groups of five amino acids on either sides of those six sets of five residues, denoted aac1 (for “amino acid cluster 1”), aac2 (for “amino acid cluster 2”), aac3 (for “amino acid cluster 3”), aac4 (for “amino acid cluster 4”), aac5 (for “amino acid cluster 5”), and aac6 (for “amino acid cluster 6”), that may be replaced by 1 to 5 amino acids selected independently from (i) any naturally occurring amino acid or (ii) any naturally occurring amino acid except proline or glycine.

[0094] With regard to FIG. 6, in some cases: i) aac1 (amino acid cluster 1) may be the amino acid sequence GTLRG (SEQ ID NO:98) or that sequence with one or two amino acids deleted or substituted with other naturally occurring amino acids (e.g., L replaced by I, V, A or F); ii) aac2 (amino acid cluster 2) may be the amino acid sequence YNQSE (SEQ ID NO:99) or that sequence with one or two amino acids deleted or substituted with other naturally occurring amino acids (e.g., N replaced by Q, Q replaced by N, and/or E replaced by D); iii) aac3 (amino acid cluster 3) may be the amino acid sequence TAADM (SEQ ID NO:100) or that sequence with one or two amino acids deleted or substituted with other naturally occurring amino acids (e.g., T replaced by S, A replaced by G, D replaced by E, and/or M replaced by L, V, or I); iv) aac4 (amino acid cluster 4) may be the amino acid sequence AQTTK (SEQ ID NO:101) or that sequence with one or two amino acids deleted or substituted with other naturally occurring amino acids (e.g., A replaced by G, Q replaced by N, or T replaced by S, and/or K replaced by R or Q); v) aac5 (amino acid cluster 5) may be the amino acid sequence VETRP (SEQ ID NO:102) or that sequence with one or two amino acids deleted or substituted with other naturally occurring amino acids (e.g., V replaced by I or L, E replaced by D, T replaced by S, and/or R replaced by K); and/or vi) aac6 (amino acid cluster 6) may be the amino acid sequence GDGTF (SEQ ID NO:103) or that sequence with one or two amino acids deleted or substituted with other naturally occurring amino acids (e.g., D replaced by E, T replaced by S, or F replaced by L, W, or Y).

[0095] FIGS. 7-9 provide alignments of mature HLA class I heavy chain amino acid sequences (without leader sequences or transmembrane domains or intracellular domains). The aligned amino acid sequences in FIG. 7A are HLA-A class I heavy chains of the following alleles: A*0101, A*0201, A*0301, A*1101, A*2301, A*2402, A*2407, A*3303, and A*3401. The aligned amino acid sequences in FIG. 8A are HLA-B class I heavy chains of the following alleles: B*0702, B*0801, B*1502, B*3802, B*4001, B*4601, and B*5301. The aligned amino acid sequences in FIG. 9A are HLA-C class I heavy chains of the following alleles: C*0102, C*0303, C*0304, C*0401, C*0602, C*0701, C*0801, and C*1502. Indicated in the alignments are the locations (84 and 139 of the mature proteins) where cysteine residues may be introduced (e.g., by substitution) for the formation of a disulfide bond to stabilize the HLA H chain—β2M complex. Also shown in the alignment is position 236 (of the mature polypeptide), which may be substituted by a cysteine residue that can form an inter-chain disulfide bond with β2M (e.g., at aa 12). The boxes flanking residues 84, 139 and 236 show the groups of five amino acids on either sides of those six sets of five residues, denoted aac1 (for “amino acid cluster 1”), aac2 (for “amino acid cluster 2”), aac3 (for “amino acid cluster 3”), aac4 (for “amino acid cluster 4”), aac5 (for “amino acid cluster 5”), and aac6 (for “amino acid cluster 6”), that may be replaced by 1 to 5 amino acids selected independently from (i) any naturally occurring amino acid or (ii) any naturally occurring amino acid except proline or glycine.

[0096] FIGS. 7A, 8A, and 9A provide alignments of the amino acid sequences of mature HLA-A, -B, and -C class I heavy chains, respectively. The sequences are provided for the extracellular portion of the mature protein (without leader sequences or transmembrane domains or intracellular domains). As described in FIG. 6, the positions of aa residues 84, 139, and 236 and their flanking residues (aac1 to aac6) that may be replaced by 1 to 5 amino acids selected independently from (i) any naturally occurring amino acid or (ii) any naturally occurring amino acid except proline or glycine ae also shown. FIGS. 7B, 8B, and 9B provide consensus amino acid sequences for the HLA-A, -B, and -C sequences, respectively, provide in FIGS. 7A, 8A, and 9A. The consensus sequences show the variable amino acid positions as “X” residues sequentially numbered and the locations of amino acids 84, 139 and 236 double underlined.

[0097] With regard to FIG. 7A, in some cases: i) aac1 (amino acid cluster 1) may be the amino acid sequence GTLRG (SEQ ID NO: 98) or that sequence with one or two amino acids deleted or substituted with other naturally occurring amino acids (e.g., L replaced by I, V, A or F); ii) aac2 (amino acid cluster 2) may be the amino acid sequence YNQSE (SEQ ID NO: 99) or that sequence with one or two amino acids deleted or substituted with other naturally occurring amino acids (e.g., N replaced by Q, Q replaced by N, and/or E replaced by D); iii) aac3 (amino acid cluster 3) may be the amino acid sequence TAADM (SEQ ID NO: 100) or that sequence with one or two amino acids deleted or substituted with other naturally occurring amino acids (e.g., T replaced by S, A replaced by G, D replaced by E, and/or M replaced by L, V, or I); iv) aac4 (amino acid cluster 4) may be the amino acid sequence AQTTK (SEQ ID NO: 101) or that sequence with one or two amino acids deleted or substituted with other naturally occurring amino acids (e.g., A replaced by G, Q replaced by N, or T replaced by S, and or K replaced by R or Q); v) aac5 (amino acid cluster 5) may be the amino acid sequence VETRP (SEQ ID NO: 102) or that sequence with one or two amino acids deleted or substituted with other naturally occurring amino acids (e.g., V replaced by I or L, E replaced by D, T replaced by S, and/or R replaced by K); and/or vi) aac6 (amino acid cluster 6) may be the amino acid sequence GDGTF (SEQ ID NO: 103) or that sequence with one or two amino acids deleted or substituted with other naturally occurring amino acids (e.g., D replaced by E, T replaced by S, or F replaced by L, W, or Y).

[0098] With regard to FIG. 8A, in some cases: i) aac1 (amino acid cluster 1) may be the amino acid sequence RNLRG (SEQ ID NO: 104) or that sequence with one or two amino acids deleted or substituted with other naturally occurring amino acids (e.g., N replaced by T or I; and/or L replaced by A; and/or the second R replaced by L; and/or the G replaced by R); ii) aac2 (amino acid cluster 2) may be the amino acid sequence YNQSE (SEQ ID NO: 99) or that sequence with one or two amino acids deleted or substituted with other naturally occurring amino acids (e.g., N replaced by Q, Q replaced by N, and/or E replaced by D); iii) aac3 (amino acid cluster 3) may be the amino acid sequence TAADT (SEQ ID NO:105) or that sequence with one or two amino acids deleted or substituted with other naturally occurring amino acids (e.g., the first T replaced by S; and/or A replaced by G; and/or D replaced by E; and/or the second T replaced by S); iv) aac4 (amino acid cluster 4) may be the amino acid sequence AQITQ (SEQ ID NO:106) or that sequence with one or two amino acids deleted or substituted with other naturally occurring amino acids (e.g., A replaced by G; and/or the first Q replaced by N; and/or I replaced by L or V; and/or the T replaced by S; and/or the second Q replaced by N); v) aac5 (amino acid cluster 5) may be the amino acid sequence VETRP (SEQ ID NO: 102) or that sequence with one or two amino acids deleted or substituted with other naturally occurring amino acids (e.g., V replaced by I or L, E replaced by D, T replaced by S, and/or R replaced by K); and/or vi) aac6 (amino acid cluster 6) may be the amino acid sequence GDRTF (SEQ ID NO:107) or that sequence with one or two amino acids deleted or substituted with other naturally occurring amino acids (e.g., D replaced by E; and/or T replaced by S; and/or R replaced by K or H; and/or F replaced by L, W, or Y).

[0099] With regard to FIG. 9A, in some cases: i) aac1 (amino acid cluster 1) may be the amino acid sequence RNLRG (SEQ ID NO:104) or that sequence with one or two amino acids deleted or substituted with other naturally occurring amino acids (e.g., N replaced by K; and/or L replaced by A or I; and/or the second R replaced by H; and/or the G replaced by T or S); ii) aac2 (amino acid cluster 2) may be the amino acid sequence YNQSE (SEQ ID NO:99) or that sequence with one or two amino acids deleted or substituted with other naturally occurring amino acids (e.g., N replaced by Q, Q replaced by N, and/or E replaced by D); iii) aac3 (amino acid cluster 3) may be the amino acid sequence TAADT (SEQ ID NO:105) or that sequence with one or two amino acids deleted or substituted with other naturally occurring amino acids (e.g., the first T replaced by S; and/or A replaced by G; and/or D replaced by E; and/or the second T replaced by S); iv) aac4 (amino acid cluster 4) may be the amino acid sequence AQITQ (SEQ ID NO:106) or that sequence with one or two amino acids deleted or substituted with other naturally occurring amino acids (e.g., A replaced by G; and/or the first Q replaced by N; and/or I replaced by L; and/or the second Q replaced by N or K); v) aac5 (amino acid cluster 5) may be the amino acid sequence VETRP (SEQ ID NO:102) or that sequence with one or two amino acids deleted or substituted with other naturally occurring amino acids (e.g., V replaced by I or L, E replaced by D, T replaced by S, and/or R replaced by K or H); and/or vi) aac6 (amino acid cluster 6) may be the amino acid sequence GDGTF (SEQ ID NO:103) or that sequence with one or two amino acids deleted or substituted with other naturally occurring amino acids (e.g., D replaced by E; and/or T replaced by S; and/or F replaced by L, W, or Y).

### HLA-A

[0100] In some cases, a TMMP of the present disclosure comprises an HLA-A heavy chain polypeptide. The HLA-A heavy chain peptide sequences, or portions thereof, that may be that may be incorporated into a TMMP of the present disclosure include, but are not limited to, the alleles: A*0101, A*0201, A*0301, A*1101, A*2301, A*2402, A*2407, A*3303, and A*3401, which are aligned without all, or substantially all, of the leader, transmembrane and cytoplasmic sequences in FIG. 7A. Any of those alleles may comprise a mutation at one or more of positions 84, 139 and/or 236 (as shown in FIG. 7A) selected from: a tyrosine to alanine at position 84 (Y84A); a tyrosine to cysteine at position 84 (Y84C); an alanine to cysteine at position 139 (A139C); and an alanine to cysteine substitution at position 236 (A236C). In addition, HLA-A sequence having at least 75% (e.g., at least 80%, at least 85%, at least 90%, at least 95%, at least 98%, at least 99%) or 100% amino acid sequence identity to all or part (e.g., 50, 75, 100, 150, 200, or 250 contiguous amino acids) of the sequence of those HLA-A alleles may also be employed (e.g., it may comprise 1-25, 1-5, 5-10, 10-15, 15-20, 20-25, or 25-30 amino acid insertions, deletions, and/or substitutions).

[0101] In some cases, a TMMP of the present disclosure comprises an HLA-A heavy chain polypeptide comprising the following HLA-A consensus amino acid sequence:

(SEQ ID NO: 61)
GSHSMRYFX1TSVSRPGRGEPRFIAVGYVDDTQFVRFDSDAASQX2MEPR
APWIEQEGPEYWDX3X4TX5X6X7KAX8SQX9X10RX11X12LX13X14
X15X16X17YYNQSEX18GSHTX19QX20MX21GCDVGX22DX23RFLRG
YX24QX25AYDGKDYIALX26EDLRSWTAADMAAQX27TX287X29KWE
X30X31X32EAEQX33RX34YLX35GX36CVX37X38LRRYLENGKETLQ
RTDX39PKTHMTHHX40X41SDHEATLRCWALX42FYPAEITLTWQRDGE
DQTQDTELVETRPAGDGTFQKWAX43VVVPSGX44EQRYTCHVQHEGLPK
PLTLRWEX45,

wherein X1 is F, Y, S, or T; X2 is K or R; X3 is Q, G, E, or R; X4 is N or E; X5 is R or G; X6 is N or K; X7 is M or V; X8 is H or Q; X9 is T or I; X10 is D or H; X11 is A, V, or E; X12 is N or D; X13 is G or R; X14 is T or 1; X15 is L or A; X16 is R or L; X17 is G or R; X18 is A or D; X19 is 1, L, or V; X20 is 1, R or M; X21 is F or Y; X22 is S or P; X23 is W or G; X24 is R, H, or Q; X25 is D or Y; X26 is Nor K; X27 is T or T; X28 is K or Q; X29 is R or H; X30 is A or T; X31 is A or V; X32 is H or R; X33 is R, L, Q, or W; X34 is V or A; X35 is D or E; X36 is R or T; X37 is D or E; X38 is W or G; X39 is P or A; X40 is P or A; X41 is V or I; X42 is S or G; X43 is A or S; X44 is Q or E; and X45 is P or L.

[0102] As one example, an MHC Class I heavy chain polypeptide of a TMMP can comprise an amino acid sequence having at least 75%, at least 80%, at least 85%, at least 90%, at least 95%, at least 98%, at least 99%, or 100%, amino acid sequence identity to the following human HLA-A heavy chain amino acid sequence:

(SEQ ID NO: 108)
[sequence omitted]

[0103] In some cases, an HLA-A heavy chain polypeptide suitable for inclusion in a TMMP of the present disclosure comprises the following amino acid sequence: GSHSMRYFFTSVSRPGRGEPRFIAVGYVDDTQFVRFDSDAASQRMEPRAPWIEQEGPEYWDGET RKVKAHSQTHRVDLGTLRGYYNQSEAGSHTVQRMYGCDVGSDWRFLRGYHQYAYDGKDYIA LKEDLRSWTAADMAAQTTKHKWEAAHVAEQLRAYLEGTCVEWLRRYLENGKETLQRTDAPK THMTHHAVSDHEATLRCWALSFYPAEITLTWQRDGEDQTQDTELVETRPAGDGTFQKWAAVV VPSGQEQRYTCHVQHEGLPKPLTLRWEP (SEQ ID NO:109). This HLA-A heavy chain polypeptide is also referred to as “HLA-A*0201” or simply “HLA-A02.” In some cases, the C-terminal Pro is not included in a TMMP of the present disclosure. For example, in some cases, an HLA-A02 polypeptide suitable for inclusion in a TMMP of the present disclosure comprises the following amino acid sequence.

(SEQ ID NO: 110)
[sequence omitted]

### HLA-A (Y84A; A236C)

[0104] In some cases, the MHC Class I heavy chain polypeptide comprises Y84A and A236C substitutions. For example, in some cases, the MHC Class I heavy chain polypeptide comprises an amino acid sequence having at least 75%, at least 80%, at least 85%, at least 90%, at least 95%, at least 98%, at least 99%, or 100%, amino acid sequence identity to the following human HLA-A heavy chain (Y84A; A236C) amino acid sequence: GSHSMRYFFTSVSRPGRGEPRFIAVGYVDDTQFVRFDSDAASQRMEPRAPWIEQEGPEYWDGET RKVKAHSQTHRVDLGTLRGAYNQSEAGSHTVQRMYGCDVGSDWRFLRGYHQYAYDGKDYIA LKEDLRSWTAADMAAQTTKHKWEAAHVAEQLRAYLEGTCVEWLRRYLENGKETLQRTDAPK THMTHHAVSDHEATLRCWALSFYPAEITLTWQRDGEDQTQDTELVETRPCGDGTFQKWAAVV VPSGQEQRYTCHVQHEGLPKPLTLRWEP (SEQ ID NO:111), where amino acid 84 is Ala and amino acid 236 is Cys. In some cases, the Cys-236 forms an interchain disulfide bond with Cys-12 of a variant β2M polypeptide that comprises an R12C substitution.

[0105] In some cases, an HLA-A heavy chain polypeptide suitable for inclusion in a TMMP of the present disclosure is an HLA-A02 (Y84A; A236C) polypeptide comprising the following amino acid sequence:

(SEQ ID NO: 112)
GSHSMRYFFTSVSRPGRGEPRFIAVGYVDDTQFVRFDSDAASQRMEPRAP
WIEQEGPEYWDGETRKVKAHSQTHRVDLGTLRGAYNQSEAGSHTVQRMYG
CDVGSDWRFLRGYHQYAYDGKDYIALKEDLRSWTAADMAAQTTKHKWEAA
HVAEQLRAYLEGTCVEWLRRYLENGKETLQRTDAPKTHMTHHAVSDHEAT
LRCWALSFYPAEITLTWQRDGEDQTQDTELVETRPCGDGTFQKWAAVVVP
SGQEQRYTCHVQHEGLPKPLTLRWEP.

[0106] In some cases, an HLA-A heavy chain polypeptide suitable for inclusion in a TMMP of the present disclosure is an HLA-A02 (Y84A; A236C) polypeptide comprising the following amino acid sequence:

(SEQ ID NO: 113)
GSHSMRYFFTSVSRPGRGEPRFIAVGYVDDTQFVRFDSDAASQRMEPRAP
WIEQEGPEYWDGETRKVKAHSQTHRVDLGTLRGAYNQSEAGSHTVQRMYG
CDVGSDWRFLRGYHQYAYDGKDYIALKEDLRSWTAADMAAQTTKHKWEAA
HVAEQLRAYLEGTCVEWLRRYLENGKETLQRTDAPKTHMTHHAVSDHEAT
LRCWALSFYPAEITLTWQRDGEDQTQDTELVETRPCGDGTFQKWAAVVVP
SGQEQRYTCHVQHEGLPKPLTLRWE.

### HLA-A (Y84C; A139C)

[0107] In some cases, the MHC Class I heavy chain polypeptide comprises Y84C and A139C substitutions. For example, in some cases, the MHC Class I heavy chain polypeptide comprises an amino acid sequence having at least 75%, at least 80%, at least 85%, at least 90%, at least 95%, at least 98%, at least 99%, or 100%, amino acid sequence identity to the following human HLA-A heavy chain (Y84C; A139C) amino acid sequence: GSHSMRYFFTSVSRPGRGEPRFIAVGYVDDTQFVRFDSDAASQRMEPRAPWIEQEGPEYWDGET RKVKAHSQTHRVDLGTLRGCYNQSEAGSHTVQRMYGCDVGSDWRFLRGYHQYAYDGKDYIA LKEDLRSWTAADMCAQTTKHKWEAAHVAEQLRAYLEGTCVEWLRRYLENGKETLQRTDAPK THMTHHAVSDHEATLRCWALSFYPAEITLTWQRDGEDQTQDTELVETRPAGDGTFQKWAAVV VPSGQEQRYTCHVQHEGLPKPLTLRWEP (SEQ ID NO:114), where amino acid 84 is Cys and amino acid 139 is Cys. In some cases, Cys-84 forms an intrachain disulfide bond with Cys-139.

### HLA-A11 (HLA-A*1101)

[0108] As one non-limiting example, an MHC Class I heavy chain polypeptide of a TMMP can comprise an amino acid sequence having at least 75%, at least 80%, at least 85%, at least 90%, at least 95%, at least 98%, at least 99%, or 100%, amino acid sequence identity to the following human HLA-A11 heavy chain amino acid sequence: GSHSMRYFYTSVSRPGRGEPRFIAVGYVDDTQFVRFDSDAASQRMEPRAPWIEQEGPEYWDQE TRNVKAQSQTDRVDLGTLRGYYNQSEDGSHTIQIMYGCDVGPDGRFLRGYRQDAYDGKDYIA LNEDLRSWTAADMAAQITKRKWEAAHAAEQQRAYLEGTCVEWLRRYLENGKETLQRTDPPKT HMTHHPISDHEATLRCWALGFYPAEITLTWQRDGEDQTQDTELVETRPAGDGTFQKWAAVVV PSGEEQRYTCHVQHEGLPKPLTLRWE (SEQ ID NO:115). Such an MHC Class I heavy chain may be prominent in Asian populations, including populations of individuals of Asian descent.

### HLA-A11 (Y84A; A236C)

[0109] As one non-limiting example, in some cases, the MHC Class I heavy chain polypeptide is an HLA-A11 allele that comprises Y84A and A236C substitutions. For example, in some cases, the MHC Class I heavy chain polypeptide comprises an amino acid sequence having at least 75%, at least 80%, at least 85%, at least 90%, at least 95%, at least 98%, at least 99%, or 100%, amino acid sequence identity to the following human HLA-A A11 heavy chain (Y84A; A236C) amino acid sequence: GSHSMRYFYTSVSRPGRGEPRFIAVGYVDDTQFVRFDSDAASQRMEPRAPWIEQEGPEYWDQE TRNVKAQSQTDRVDLGTLRGAYNQSEDGSHTIQIMYGCDVGPDGRFLRGYRQDAYDGKDYIA LNEDLRSWTAADMAAQITKRKWEAAHAAEQQRAYLEGTCVEWLRRYLENGKETLQRTDPPKT HMTHHPISDHEATLRCWALGFYPAEITLTWQRDGEDQTQDTELVETRPCGDGTFQKWAAVVV PSGEEQRYTCHVQHEGLPKPLTLRWE (SEQ ID NO:116), where amino acid 84 is Ala and amino acid 236 is Cys. In some cases, the Cys-236 forms an interchain disulfide bond with Cys-12 of a variant β2M polypeptide that comprises an R12C substitution.

### HLA-A24 (HLA-A*2402)

[0110] As one non-limiting example, an MHC Class I heavy chain polypeptide of a TMMP of the present disclosure can comprise an amino acid sequence having at least 75%, at least 80%, at least 85%, at least 90%, at least 95%, at least 98%, at least 99%, or 100%, amino acid sequence identity to the following human HLA-A24 heavy chain amino acid sequence: GSHSMRYFSTSVSRPGRGEPRFIAVGYVDDTQFVRFDSDAASQRMEPRAPWIEQEGPEYWDEET GKVKAHSQTDRENLRIALRYYNQSEAGSHTLQMMFGCDVGSDGRFLRGYHQYAYDGKDYIAL KEDLRSWTAADMAAQITKRKWEAAHVAEQQRAYLEGTCVDGLRRYLENGKETLQRTDPPKT HMTHHPISDHEATLRCWALGFYPAEITLTWQRDGEDQTQDTELVETRPAGDGTFQKWAAVVV PSGEEQRYTCHVQHEGLPKPLTLRWEPSSQPTVPIVGIIAGLVLLGAVITGAVVAAVMWRRNSS DRKGGSYSQAASSDSAQGSDVSLTACKV (SEQ ID NO:117). Such an MHC Class I heavy chain may be prominent in Asian populations, including populations of individuals of Asian descent. In some cases, amino acid 84 is an Ala. In some cases, amino acid 84 is a Cys. In some cases, amino acid 236 is a Cys. In some cases, amino acid 84 is an Ala and amino acid 236 is a Cys. In some cases, amino acid 84 is an Cys and amino acid 236 is a Cys.

### HLA-A33 (HLA-A*3303)

[0111] As one non-limiting example, an MHC Class I heavy chain polypeptide of a TMMP of the present disclosure can comprise an amino acid sequence having at least 75%, at least 80%, at least 85%, at least 90%, at least 95%, at least 98%, at least 99%, or 100%, amino acid sequence identity to the following human HLA-A33 heavy chain amino acid sequence: GSHSMRYFTTSVSRPGRGEPRFIAVGYVDDTQFVRFDSDAASQRMEPRAPWIEQEGPEYWDRN TRNVKAHSQIDRVDLGTLRGYYNQSEAGSHTIQMMYGCDVGSDGRFLRGYQQDAYDGKDYIA LNEDLRSWTAADMAAQITQRKWEAARVAEQLRAYLEGTCVEWLRRYLENGKETLQRTDPPKT HMTHHAVSDHEATLRCWALSFYPAEITLTWQRDGEDQTQDTELVETRPAGDGTFQKWASVVV PSGQEQRYTCHVQHEGLPKPLTLRWEPSSQPTIPIVGIIAGLVLFGAVFAGAVVAAVRWRRKSSD RKGGSYSQAASSDSAQGSDMSLTACKV (SEQ ID NO:118). Such an MHC Class I heavy chain may be prominent in Asian populations, including populations of individuals of Asian descent. In some cases, amino acid 84 is an Ala. In some cases, amino acid 84 is a Cys. In some cases, amino acid 236 is a Cys. In some cases, amino acid 84 is an Ala and amino acid 236 is a Cys. In some cases, amino acid 84 is an Cys and amino acid 236 is a Cys.

### HLA-B

[0112] In some cases, a TMMP of the present disclosure comprises an HLA-B heavy chain polypeptide. The HLA-B heavy chain peptide sequences, or portions thereof, that may be that may be incorporated into a TMMP of the present disclosure include, but are not limited to, the alleles: B*0702, B*0801, B*1502, B*3802, B*4001, B*4601, and B*5301, which are aligned without all, or substantially all, of the leader, transmembrane and cytoplasmic sequences in FIG. 8A. Any of those alleles may comprise a mutation at one or more of positions 84, 139 and/or 236 (as shown in FIG. 8A) selected from: a tyrosine to alanine at position 84 (Y84A); a tyrosine to cysteine at position 84 (Y84C); an alanine to cysteine at position 139 (A139C); and an alanine to cysteine substitution at position 236 (A236C). In addition, a HLA-B polypeptide comprising an amino acid sequence having at least 75% (e.g., at least 80%, at least 85%, at least 90%, at least 95%, at least 98%, at least 99%) or 100% amino acid sequence identity to all or part (e.g., 50, 75, 100, 150, 200, or 250 contiguous amino acids) of the sequence of those HLA-B alleles may also be employed (e.g., it may comprise 1-25, 1-5, 5-10, 10-15, 15-20, 20-25, or 25-30 amino acid insertions, deletions, and/or substitutions).

[0113] In some cases, a TMMP of the present disclosure comprises an HLA-B heavy chain polypeptide comprising the following HLA-B consensus amino acid sequence:

(SEQ ID NO: 69)
GSHSMRYFX1TX2X3SRPGRGEPRFIX4VGYVDDTX5FVRFDSDAX6SPR
X7X8PRAPWIEQEGPEYWDRX9TQX10X11KTX12X13TQX14YX15X16
NLX17X18X19X20YYNQSEAGSHX21X22QX23MYGCDLGPDGRLLRGH
DQSAYDGKDYIALNEDLX24SWTAADTAAQIX25QRKX26EAARX27AEQ
X28RX29YLEGX30CVEWLRRYLENGKX31X32LX33RADPPKTHVTHHP
X34SDHEATLRCWALGFYPAEITLTWQRDGEDQTQDTELVETRPAGDRTF
QKWAAVVVPSGEEQRYTCHVQHEGLPKPLTLRWEP,

wherein X1 is H, Y, or D; X2 is A or S; X3 is M or V; X4 is A, S, or T; X5 is Q or L; X6 is A or T; X7 is E, M K, or T; X8 is A or T; X9 is E or N; X10 is I or K; X11 is Y, F, S, or C; X12 is N or Q; X13 is A or T; X14 is D or Y; X15 is E or V; X16 is S or N; X17 is T, N, or I; X18 is A or L; X19 is L, or R; X20 is R or G; X21 is T or I; X22 is L or I; X23 is R or S; X24 is R or S; X25 is S or T; X26 is L or W; X27 is E OR V; X28 is R, D, L or W; X29 is A or T; X30 is L, E or T; X31 is E or D; X32 is K or T; X33 is E or Q; and X34 is I or V.

[0114] As an example, an MHC Class I heavy chain polypeptide of a TMMP of the present disclosure can comprise an amino acid sequence having at least 75%, at least 80%, at least 85%, at least 90%, at least 95%, at least 98%, at least 99%, or 100%, amino acid sequence identity to the following human HLA-B heavy chain amino acid sequence:

(SEQ ID NO: 119)
[sequence omitted]

### HLA-B (Y84A; A236C)

[0115] As one non-limiting example, in some cases, the MHC Class I heavy chain polypeptide is an HLA-B polypeptide that comprises Y84A and A236C substitutions. For example, in some cases, the MHC Class I heavy chain polypeptide comprises an amino acid sequence having at least 75%, at least 80%, at least 85%, at least 90%, at least 95%, at least 98%, at least 99%, or 100%, amino acid sequence identity to the following human HLA-B heavy chain (Y84A; A236C) amino acid sequence: GSHSMRYFYTSVSRPGRGEPRFISVGYVDDTQFVRFDSDAASPREEPRAPWIEQEGPEYWDRNT QIYKAQAQTDRESLRNLRGAYNQSEAGSHTLQSMYGCDVGPDGRLLRGHDQYAYDGKDYIAL NEDLRSWTAADTAAQITQRKWEAAREAEQRRAYLEGECVEWLRRYLENGKDKLERADPPKTH VTHHPISDHEATLRCWALGFYPAEITLTWQRDGEDQTQDTELVETRPCGDRTFQKWAAVVVPS GEEQRYTCHVQHEGLPKPLTLRWEP (SEQ ID NO:121), where amino acid 84 is Ala and amino acid 236 is Cys. In some cases, the Cys-236 forms an interchain disulfide bond with Cys-12 of a variant β2M polypeptide that comprises an R12C substitution.

### HLA-B (Y84C; A139C)

[0116] In some cases, the MHC Class I heavy chain polypeptide comprises Y84C and A139C substitutions. For example, in some cases, the MHC Class I heavy chain polypeptide comprises an amino acid sequence having at least 75%, at least 80%, at least 85%, at least 90%, at least 95%, at least 98%, at least 99%, or 100%, amino acid sequence identity to the following human HLA-B heavy chain (Y84C; A139C) amino acid sequence: GSHSMRYFYTSVSRPGRGEPRFISVGYVDDTQFVRFDSDAASPREEPRAPWIEQEGPEYWDRNT QIYKAQAQTDRESLRNLRGCYNQSEAGSHTLQSMYGCDVGPDGRLLRGHDQYAYDGKDYIAL NEDLRSWTAADTCAQITQRKWEAAREAEQRRAYLEGECVEWLRRYLENGKDKLERADPPKTH VTHHPISDHEATLRCWALGFYPAEITLTWQRDGEDQTQDTELVETRPAGDRTFQKWAAVVVPS GEEQRYTCHVQHEGLPKPLTLRWEP (SEQ ID NO:122), where amino acid 84 is Cys and amino acid 139 is Cys. In some cases, Cys-84 forms an intrachain disulfide bond with Cys-139.

### HLA-B*0702

[0117] As an example, in some cases, a MHC Class I heavy chain polypeptide present in a TMMP of the present disclosure comprises an amino acid sequence of HLA-B*0702 (SEQ ID NO:62) in FIG. 8A, or a sequence having at least 75% (e.g., at least 80%, at least 85%, at least 90%, at least 95%, at least 98%, at least 99%) or 100%, amino acid sequence identity to all or part (e.g., 50, 75, 100, 150, 200, or 250 contiguous amino acids) of that sequence (e.g., it may comprise 1-25, 1-5, 5-10, 10-15, 15-20, 20-25, or 25-30 amino acid insertions, deletions, and/or substitutions). In some cases, where the HLA-B heavy chain polypeptide of TMMP of the present disclosure has less than 100% identity to the sequence labeled HLA-B in FIG. 6, or labeled “B*0702 in FIG. 8A, it may comprise a mutation at one or more of positions 84, 139 and/or 236 selected from: a tyrosine to alanine substitution at position 84 (Y84A); a tyrosine to cysteine substitution at position 84 (Y84C); an alanine to cysteine at position 139 (A139C); and an alanine to cysteine substitution at position 236 (A236C). In some cases, the HLA-B heavy chain polypeptide of TMMP of the present disclosure comprises Y84A and A236C substitutions. In some cases, the HLA-B*0702 heavy chain polypeptide of TMMP of the present disclosure comprises Y84C and A139C substitutions. In some cases, the HLA-B heavy chain polypeptide of TMMP of the present disclosure comprises Y84C, A139C, and A236C substitutions.

### HLA-C

[0118] In some cases, a TMMP of the present disclosure comprises an HLA-C heavy chain polypeptide. The HLA-C heavy chain polypeptide, or portions thereof, that may be that may be incorporated into a TMMP of the present disclosure include, but are not limited to, the alleles: C*0102, C*0303, C*0304, C*0401, C*0602, C*0701, C*0801, and C*1502, which are aligned without all, or substantially all, of the leader, transmembrane and cytoplasmic sequences in FIG. 9A. Any of those alleles may comprise a mutation at one or more of positions 84, 139 and/or 236 (as shown in FIG. 9A) selected from: a tyrosine to alanine substitution at position 84 (Y84A); a tyrosine to cysteine substitution at position 84 (Y84C); an alanine to cysteine substitution at position 139 (A139C); and an alanine to cysteine substitution at position 236 (A236C). In addition, an HLA-C polypeptide comprising an amino acid sequence having at least 75% (e.g., at least 80%, at least 85%, at least 90%, at least 95%, at least 98%, at least 99%) or 100% amino acid sequence identity to all or part (e.g., 50, 75, 100, 150, 200, or 250 contiguous amino acids) of the sequence of those HLA-C alleles may also be employed (e.g., it may comprise 1-25, 1-5, 5-10, 10-15, 15-20, 20-25, or 25-30 amino acid insertions, deletions, and/or substitutions).

[0119] In some cases, a TMMP of the present disclosure comprises an HLA-C heavy chain polypeptide comprising the following HLA-C consensus amino acid sequence:

[0120] X1SHSMX2YFX3TAVSX4PGRGEPX5FIX6VGYVDDTQFVX7FDSDAASPRGEPRX8 PWVEQEGPEYWDRETQX9YKRQAQX10DRVX11LRX12LRGYYNQSEX13X14SHX15X16QX17MX18GCDX19GPDGRLLRGX20X21QX22AYDGKDYIALNEDLRSWTAADTAAQITQRKX23EA ARX24AEQX25RAYLEGX26CVEWLRRYLX27NGKX28TLQRAEX29PKTHVTHHPX30SDHEAT LRCWALGFYPAEITLTWQX31DGEDQTQDTELVETRPAGDGTFQKWAAVX32VPSGX33EQRYT CHX34QHEGLX35EPLTLX36WX37P (SEQ ID NO:79), wherein X1 is C or G; X2 is R or K; X3 is F, Y, S, or D; X4 is R or W; X5 is H or R; X6 is A or S; X7 is Q or R; X8 is A or E; X9 is N or K; X10 is T or A; X11 is S or N; X12 is N or K; X13 is A or D; X14 is G or R; X15 is T or I; X16 is L or I; X17 is W or R; X18 is C, Y, F, or S; X19 is L, or V; X20 is Y or H; X21 is D or N; X22 is Y, F, S, or L; X23 is L or W; X24 is E, A, Or T; X25 is R, L, or W; X26 is L or T; X27 is E OR K; X28 is E or K; X29 is H or P; X30 is R or V; X31 is W or R; X32 is V or M; X33 is E or Q; X34 is M or V; X35 is P or Q; X36 is R or S; and X37 is P or G.

[0121] As an example, an MHC Class I heavy chain polypeptide of a TMMP of the present disclosure can comprise an amino acid sequence having at least 75%, at least 80%, at least 85%, at least 90%, at least 95%, at least 98%, at least 99%, or 100%, amino acid sequence identity to the following human HLA-C heavy chain amino acid sequence:

(SEQ ID NO: 123)
CSHSMRYFDTAVSRPGRGEPRFISVGYVDDTQFVRFDSDAASPRGEPRAP
WVEQEGPEYWDRETQNYKRQAQADRVSLRNLRGYYNQSEDGSHTLQRMYG
CDLGPDGRLLRGYDQSAYDGKDYIALNEDLRSWTAADTAAQITQRKLEAA
RAAEQLRAYLEGTCVEWLRRYLENGKETLQRAEPPKTHVTHHPLSDHEAT
LRCWALGFYPAEITLTWQRDGEDQTQDTELVETRPAGDGTFQKWAAVVVP
SGQEQRYTCHMQHEGLQEPLTLSWEP.

### HLA-C(Y84A; A236C)

[0122] As one non-limiting example, in some cases, the MHC Class I heavy chain polypeptide is an HLA-C polypeptide that comprises Y84A and A236C substitutions. For example, in some cases, the MHC Class I heavy chain polypeptide comprises an amino acid sequence having at least 75%, at least 80%, at least 85%, at least 90%, at least 95%, at least 98%, at least 99%, or 100%, amino acid sequence identity to the following human HLA-C heavy chain (Y84A; A236C) amino acid sequence: CSHSMRYFDTAVSRPGRGEPRFISVGYVDDTQFVRFDSDAASPRGEPRAPWVEQEGPEYWDRE TQNYKRQAQADRVSLRNLRGAYNQSEDGSHTLQRMYGCDLGPDGRLLRGYDQSAYDGKDYI ALNEDLRSWTAADTAAQITQRKLEAARAAEQLRAYLEGTCVEWLRRYLENGKETLQRAEPPKT HVTHHPLSDHEATLRCWALGFYPAEITLTWQRDGEDQTQDTELVETRPCGDGTFQKWAAVVV PSGQEQRYTCHMQHEGLQEPLTLSWEP (SEQ ID NO:124), where amino acid 84 is Ala and amino acid 236 is Cys. In some cases, the Cys-236 forms an interchain disulfide bond with Cys-12 of a variant β2M polypeptide that comprises an R12C substitution.

### HLA-C(Y84C; A139C)

[0123] In some cases, the MHC Class I heavy chain polypeptide comprises Y84C and A139C substitutions. For example, in some cases, the MHC Class I heavy chain polypeptide comprises an amino acid sequence having at least 75%, at least 80%, at least 85%, at least 90%, at least 95%, at least 98%, at least 99%, or 100%, amino acid sequence identity to the following human HLA-C heavy chain (Y84C; A139C) amino acid sequence: CSHSMRYFDTAVSRPGRGEPRFISVGYVDDTQFVRFDSDAASPRGEPRAPWVEQEGPEYWDRE TQNYKRQAQADRVSLRNLRGCYNQSEDGSHTLQRMYGCDLGPDGRLLRGYDQSAYDGKDYI ALNEDLRSWTAADTCAQITQRKLEAARAAEQLRAYLEGTCVEWLRRYLENGKETLQRAEPPKT HVTHHPLSDHEATLRCWALGFYPAEITLTWQRDGEDQTQDTELVETRPAGDGTFQKWAAVVV PSGQEQRYTCHMQHEGLQEPLTLSWEP (SEQ ID NO:125), where amino acid 84 is Cys and amino acid 139 is Cys. In some cases, Cys-84 forms an intrachain disulfide bond with Cys-139.

### HLA-C*0701

[0124] In some cases, a MHC Class I heavy chain polypeptide of a TMMP of the present disclosure comprises an amino acid sequence of HLA-C*0701 of FIG. 9A (labeled HLA-C in FIG. 6), or an amino acid sequence having at least 75% (e.g., at least 80%, at least 85%, at least 90%, at least 95%, at least 98%, at least 99%) or 100% amino acid sequence identity to all or part (e.g., 50, 75, 100, 150, 200, or 250 contiguous amino acids) of that sequence (e.g., it may comprise 1-25, 1-5, 5-10, 10-15, 15-20, 20-25, or 25-30 amino acid insertions, deletions, and/or substitutions). In some cases, where the HLA-C heavy chain polypeptide of a TMMP of the present disclosure has less than 100% identity to the sequence labeled HLA-C*0701 in FIG. 9A, it may comprise a mutation at one or more of positions 84, 139 and/or 236 selected from: a tyrosine to alanine substitution at position 84 (Y84A); a tyrosine to cysteine substitution at position 84 (Y84C); an alanine to cysteine at position 139 (A139C); and an alanine to cysteine substitution at position 236 (A236C). In some cases, the HLA-C heavy chain polypeptide of a TMMP of the present disclosure comprises Y84A and A236C substitutions. In some cases, the HLA-C*0701 heavy chain polypeptide of a T-Cell-MMP or its epitope conjugate comprises Y84C and A139C substitutions. In some cases, the HLA-C heavy chain polypeptide of a TMMP of the present disclosure comprises Y84C, A139C, and A236C substitutions.

### Non-Classical HLA-E, -F, and -G MHC Class I Heavy Chains

[0125] In some cases, a TMMP of the present disclosure comprises a non-classical MHC Class I heavy chain polypeptide. Among the non-classical HLA heavy chain polypeptides, or portions thereof, that may be that may be incorporated into a TMMP of the present disclosure include, but are not limited to, those of HLA-E, -F, and -G alleles. Amino acid sequences for HLA-E, -F, and -G heavy chain polypeptides, (and the HLA-A, B and C alleles) may be found on the world wide web hla.alleles.org/nomenclature/index.html, the European Bioinformatics Institute (www(dot)ebi(dot)ac(dot)uk), which is part of the European Molecular Biology Laboratory (EMBL), and at the National Center for Biotechnology Information (www(dot)ncbi(dot)nlm(dot)nih(dot)gov).

[0126] Non-limiting examples of suitable HLA-E alleles include, but are not limited to, HLA-E*0101 (HLA-E*01:01:01:01), HLA-E*01:03 (HLA-E*01:03:01:01), HLA-E*01:04, HLA-E*01:05, HLA-E*01:06, HLA-E*01:07, HLA-E*01:09, and HLA-E*01:10. Non-limiting examples of suitable HLA-F alleles include, but are not limited to, HLA-F*0101 (HLA-F*01:01:01:01), HLA-F*01:02, HLA-F*01:03 (HLA-F*01:03:01:01), HLA-F*01:04, HLA-F*01:05, and HLA-F*01:06. Non-limiting examples of suitable HLA-G alleles include, but are not limited to, HLA-G*0101 (HLA-G*01:01:01:01), HLA-G*01:02, HLA-G*01:03 (HLA-G*01:03:01:01), HLA-G*01:04 (HLA-G*01:04:01:01), HLA-G*01:06, HLA-G*01:07, HLA-G*01:08, HLA-G*01:09: HLA-G*01:10, HLA-G*01:10, HLA-G*01:11, HLA-G*01:12, HLA-G*01:14, HLA-G*01:15, HLA-G*01:16, HLA-G*01:17, HLA-G*01:18: HLA-G*01:19, HLA-G*01:20, and HLA-G*01:22. Consensus sequences for those HLA E, -F and -G alleles without all, or substantially all, of the leader, transmembrane and cytoplasmic sequences are provided in FIG. 10, and aligned with consensus sequences of the above-mentioned HLA-A, -B and -C alleles in FIG. 11.

[0127] FIG. 1—provides a consensus sequence for each of HLA-E, -F, and -G with the variable aa positions indicated as “X” residues sequentially numbered and the locations of aas 84, 139 and 236 double underlined.

[0128] FIG. 11 provides an alignment of the consensus amino acid sequences for HLA-A, -B, -C, -E, -F, and -G, which are given in FIGS. 7-11. Variable residues in each sequence are listed as “X” with the sequential numbering removed. As indicated in FIG. 6, the locations of aas 84, 139 and 236 are indicated with their flanking five-amino acid clusters that may be replaced by 1 to 5 amino acids selected independently from (i) any naturally occurring amino acid or (ii) any naturally occurring amino acid except proline or glycine are also shown.

[0129] Any of the above-mentioned HLA-E, -F, and/or -G alleles may comprise a substitution at one or more of positions 84, 139 and/or 236 as shown in FIG. 11 for the consensus sequences. In some cases, the substitutions may be selected from a: position 84 tyrosine to alanine (Y84A) or cysteine (Y84C), or, in the case of HLA-F, an R84A or R84C substitution; a position 139 alanine to cysteine (A139C), or, in the case of HLA-F, a V139C; and an alanine to cysteine substitution at position 236 (A236C). In addition, an HLA-E, -F and/or -G sequence having at least 75% (e.g., at least 80%, at least 85%, at least 90%, at least 95%, at least 98%, at least 99%) or 100% amino acid sequence identity to all or part (e.g., 50, 75, 100, 150, 200, or 250 contiguous amino acids) of any of the consensus sequences of set forth in FIG. 11 may also be employed (e.g., the sequences may comprise 1-25, 1-5, 5-10, 10-15, 15-20, 20-25, or 25-30 amino acid insertions, deletions, and/or substitutions in addition to changes at variable residues listed therein).

### Mouse H2K

[0130] In some cases, a MHC Class I heavy chain polypeptide present in a TMMP of the present disclosure comprises an amino acid sequence of MOUSE H2K (SEQ ID NO:45) (MOUSE H2K in FIG. 6), or a sequence having at least 75%, at least 80%, at least 85%, at least 90%, at least 95%, at least 98%, at least 99%, or 100% amino acid sequence identity to all or part (e.g., 50, 75, 100, 150, 200, or 250 contiguous amino acids) of that sequence (e.g., it may comprise 1-25, 1-5, 5-10, 10-15, 15-20, 20-25, or 25-30 amino acid insertions, deletions, and/or substitutions). In some cases, where the MOUSE H2K heavy chain polypeptide of a TMMP of the present disclosure has less than 100% identity to the sequence labeled MOUSE H2K in FIG. 6, it may comprise a mutation at one or more of positions 84, 139 and/or 236 selected from: a tyrosine to alanine at position 84 (Y84A); a tyrosine to cysteine at position 84 (Y84C); an alanine to cysteine at position 139 (A139C); and an alanine to cysteine substitution at position 236 (A236C). In some cases, the MOUSE H2K heavy chain polypeptide of a TMMP of the present disclosure comprises Y84A and A236C substitutions. In some cases, the MOUSE H2K heavy chain polypeptide of a TMMP of the present disclosure comprises Y84C and A139C substitutions. In some cases, the MOUSE H2K heavy chain polypeptide of a TMMP of the present disclosure comprises Y84C, A139C and A236C substitutions.

### Exemplary Combinations

[0131] Table 1, below, presents various combinations of MHC Class I heavy chain sequence modifications that can be incorporated in a TMMP of the present disclosure.

TABLE 1

| | | | Specific |
|---|---|---|---|
| | | Sequence | Substitutions at aa |
| | HLA Heavy | Identity | positions 84, 139 |
| Entry | Chain Sequence | Range [symbol] | and/or 236 |
| 1 | HLA-A | 75%-99.8%, 80%-99.8%, 85%-99.8%, | None; Y84C; Y84A; |
| | Consensus | 90%-99.8%, 95%-99.8%, 98%-99.8%, | A139C; A236C; |
| | (FIG. 7B) | or 99%-99.8%; or 1-25, 1-5, 5-10, 10- | (Y84A & A236C); |
| | | 15, 15-20, or 20-25 aa insertions, | (Y84C & A139C); or |
| | | deletions, and/or substitutions (not | (Y84C, A139C & |
| | | counting variable residues) | A236C) |
| 2 | A*0101, A*0201, | 75%-99.8%, 80%-99.8%, 85%-99.8%, | None; Y84C; Y84A; |
| | A*0301, A*1101, | 90%-99.8%, 95%-99.8%, 98%-99.8%, | A139C; A236C; |
| | A*2402, A*2301, | or 99%-99.8%; or 1-25, 1-5, 5-10, 10- | (Y84A & A236C); |
| | A*2402, A*2407, | 15, 15-20, or 20-25 aa insertions, | (Y84C & A139C); or |
| | A*3303, or | deletions, and/or substitutions | (Y84C, A139C & |
| | A*3401 | | A236C) |
| | (FIG. 7A) | | |
| 3 | HLA-B | 75%-99.8%, 80%-99.8%, 85%-99.8%, | None; Y84C; Y84A; |
| | Consensus | 90%-99.8%, 95%-99.8%, 98%-99.8%, | A139C; A236C; |
| | (FIG. 8B) | or 99%-99.8%; or 1-25, 1-5, 5-10, 10- | (Y84A & A236C); |
| | | 15, 15-20, or 20-25 aa insertions, | (Y84C & A139C); or |
| | | deletions, and/or substitutions (not | (Y84C, A139C & |
| | | counting variable residues) | A236C) |
| 4 | B*0702, B*0801, | 75%-99.8%, 80%-99.8%, 85%-99.8%, | None; Y84C; Y84A; |
| | B*1502, B*3802, | 90%-99.8%, 95%-99.8%, 98%-99.8%, | A139C; A236C; |
| | B*4001, B*4601, | or 99%-99.8%; or 1-25, 1-5, 5-10, 10- | (Y84A & A236C); |
| | or B*5301 | 15, 15-20, or 20-25 aa insertions, | (Y84C & A139C); or |
| | (FIG. 8A) | deletions, and/or substitutions | (Y84C, A139C & |
| | | | A236C) |
| 5 | HLA-C | 75%-99.8%, 80%-99.8%, 85%-99.8%, | None; Y84C; Y84A; |
| | Consensus | 90%-99.8%, 95%-99.8%, 98%-99.8%, | A139C; A236C; |
| | (FIG. 9B) | or 99%-99.8%; or 1-25, 1-5, 5-10, 10- | (Y84A & A236C); |
| | | 15, 15-20, or 20-25 aa insertions, | (Y84C & A139C); or |
| | | deletions, and/or substitutions (not | (Y84C, A139C & |
| | | counting variable residues) | A236C) |
| 6 | C*0102, C*0303, | 75%-99.8%, 80%-99.8%, 85%-99.8%, | None; Y84C; Y84A; |
| | C*0304, C*0401, | 90%-99.8%, 95%-99.8%, 98%-99.8%, | A139C; A236C; |
| | C*0602, C*0701, | or 99%-99.8%; or 1-25, 1-5, 5-10, 10- | (Y84A & A236C); |
| | C*0801, or | 15, 15-20, or 20-25 aa insertions, | (Y84C & A139C); or |
| | C*1502 | deletions, and/or substitutions | (Y84C, A139C & |
| | (FIG. 9A) | | A236C) |
| 7 | HLA-E, F, or G | 75%-99.8%, 80%-99.8%, 85%-99.8%, | None; Y84C; Y84A; |
| | Consensus | 90%-99.8%, 95%-99.8%, 98%-99.8%, | A139C; A236C; |
| | (FIG. 10) | or 99%-99.8%; or 1-25, 1-5, 5-10, 10- | (Y84A & A236C); |
| | | 15, 15-20, or 20-25 aa insertions, | (Y84C & A139C); or |
| | | deletions, and/or substitutions (not | (Y84C, A139C & |
| | | counting variable residues) | A236C) |
| 8 | MOUSE H2K | 75%-99.8%, 80%-99.8%, 85%-99.8%, | None; Y84C; Y84A; |
| | (FIG. 6) | 90%-99.8%, 95%-99.8%, 98%-99.8%, | A139C; A236C; |
| | | or 99%-99.8%; or 1-25, 1-5, 5-10, 10- | (Y84A & A236C); |
| | | 15, 15-20, or 20-25 aa insertions, | (Y84C & A139C); or |
| | | deletions, and/or substitutions | (Y84C, A139C & |
| | | | A236C) |

[symbol]

The Sequence Identity Range is the permissible range in sequence identity of a MHC-H polypeptide sequence incorporated into a TMMP relative to the corresponding portion of the sequences listed in FIG. 6-11 not counting the variable residues in the consensus sequences.

### Beta-2 Microglobulin

[0132] A β2-microglobulin (β2M) polypeptide of a TMMP of the present disclosure can be a human β2M polypeptide, a non-human primate β2M polypeptide, a murine β2M polypeptide, and the like. In some instances, a β2M polypeptide comprises an amino acid sequence having at least 75%, at least 80%, at least 85%, at least 90%, at least 95%, at least 98%, at least 99%, or 100%, amino acid sequence identity to a β2M amino acid sequence depicted in FIG. 6. In some instances, a β2M polypeptide comprises an amino acid sequence having at least 75%, at least 80%, at least 85%, at least 90%, at least 95%, at least 98%, at least 99%, or 100%, amino acid sequence identity to amino acids 21 to 119 of a β2M amino acid sequence depicted in FIG. 4.

[0133] In some cases, a suitable β2M polypeptide comprises the following amino acid sequence:

[0134] IQRTPKIQVY SCHPAENGKS NFLNCYVSGF HPSDIEVDLLKNGERIEKVE HSDLSFSKDW SFYLLYYTEF TPTEKDEYAC RVNHVTLSQP KIVKWDRDM (SEQ ID NO:126); and the HLA Class I heavy chain polypeptide comprises the following amino acid sequence:

[0135] GSHSMRYFFTSVSRPGRGEPRFIAVGYVDDTQFVRFDSDAASQRMEPRAPWIEQE GPEYWDGETRKVKAHSQTHRVDL(aa1){C}(aa2)AGSHTVQRMYGCDVGSDWRFLRGYHQYAY DGKDYIALKEDLRSW(aa3){C}(aa4))HKWEAAHVAEQLRAYLEGTCVEWLRRYLENGKETLQR TDAPKTHMTHHAVSDHEATLRCWALSFYPAEITLTWQRDGEDQTQDTEL(aa5)I(aa6)QKWAAV VVPSGQEQRYTCHVQHEGLPKPLTLRWEP (SEQ ID NO:127), where the cysteine residues indicated as {C} form an disulfide bond between the α1 and α2-1 helices and tII residue forms a disulfide bond with the β2M polypeptide cysteine at position 12. In the sequence above, “aa1” is “amino acid cluster 1”; “aa2” is “amino acid cluster 2”; “aa3” is “amino acid cluster 3”; “aa4” is “amino acid cluster 4”; “aa5” is “amino acid cluster 5”; and “aa6” is “amino acid cluster 6”; see, e.g., FIG. 8. Each occurrence of aa1, aa2, aa3, aa4, aa5, and aa6 is and independently selected to be 1-5 amino acid residues, wherein the amino acid residues are i) selected independently from any naturally occurring (e.g., encoded) amino acid or ii) any naturally occurring amino acid except proline or glycine.

[0136] In some cases, an MHC polypeptide comprises a single amino acid substitution relative to a reference MHC polypeptide (where a reference MHC polypeptide can be a wild-type MHC polypeptide), where the single amino acid substitution substitutes an amino acid with a cysteine (Cys) residue. Such cysteine residues, when present in an MHC polypeptide of a first polypeptide of a TMMP of the present disclosure, can form a disulfide bond with a cysteine residue present in a second polypeptide chain of a TMMP of the present disclosure.

[0137] In some cases, a first MHC polypeptide in a first polypeptide of a TMMP of the present disclosure, and/or the second MHC polypeptide in the second polypeptide of a TMMP of the present disclosure, includes an amino acid substitution to substitute an amino acid with a cysteine, where the substituted cysteine in the first MHC polypeptide forms a disulfide bond with a cysteine in the second MHC polypeptide, where a cysteine in the first MHC polypeptide forms a disulfide bond with the substituted cysteine in the second MHC polypeptide, or where the substituted cysteine in the first MHC polypeptide forms a disulfide bond with the substituted cysteine in the second MHC polypeptide.

[0138] For example, in some cases, one of following pairs of residues in an HLA 02-microglobulin and an HLA Class I heavy chain is substituted with cysteines (where residue numbers are those of the mature polypeptide): 1) β2M residue 12, HLA Class I heavy chain residue 236; 2) β2M residue 12, HLA Class I heavy chain residue 237; 3) β2M residue 8, HLA Class I heavy chain residue 234; 4) β2M residue 10, HLA Class I heavy chain residue 235; 5) β2M residue 24, HLA Class I heavy chain residue 236; 6) β2M residue 28, HLA Class I heavy chain residue 232; 7) β2M residue 98, HLA Class I heavy chain residue 192; 8) β2M residue 99, HLA Class I heavy chain residue 234; 9) β2M residue 3, HLA Class I heavy chain residue 120; 10) β2M residue 31, HLA Class I heavy chain residue 96; 11) β2M residue 53, HLA Class I heavy chain residue 35; 12) β2M residue 60, HLA Class I heavy chain residue 96; 13) β2M residue 60, HLA Class I heavy chain residue 122; 14) β2M residue 63, HLA Class I heavy chain residue 27; 15) β2M residue Arg3, HLA Class I heavy chain residue Gly120; 16) β2M residue His31, HLA Class I heavy chain residue Gln96; 17) β2M residue Asp53, HLA Class I heavy chain residue Arg35; 18) β2M residue Trp60, HLA Class I heavy chain residue Gln96; 19) β2M residue Trp60, HLA Class I heavy chain residue Asp122; 20) β2M residue Tyr63, HLA Class I heavy chain residue Tyr27; 21) β2M residue Lys6, HLA Class I heavy chain residue Glu232; 22) β2M residue Gln8, HLA Class I heavy chain residue Arg234; 23) β2M residue Tyr10, HLA Class I heavy chain residue Pro235; 24) β2M residue Ser11, HLA Class I heavy chain residue Gln242; 25) β2M residue Asn24, HLA Class I heavy chain residue Ala236; 26) β2M residue Ser28, HLA Class I heavy chain residue Glu232; 27) β2M residue Asp98, HLA Class I heavy chain residue His192; and 28) β2M residue Met99, HLA Class I heavy chain residue Arg234. The amino acid numbering of the MHC/HLA Class I heavy chain is in reference to the mature MHC/HLA Class I heavy chain, without a signal peptide. For example, in some cases, residue 236 of the mature HLA-A amino acid sequence is substituted with a Cys. In some cases, residue 236 of the mature HLA-B amino acid sequence is substituted with a Cys. In some cases, residue 236 of the mature HLA-C amino acid sequence is substituted with a Cys. In some cases, residue 32 (corresponding to Arg-12 of mature β2M) of an amino acid sequence depicted in FIG. 4 is substituted with a Cys.

[0139] In some cases, a β2M polypeptide comprises the amino acid sequence: IQRTPKIQVY SRHPAENGKS NFLNCYVSGF HPSDIEVDLLKNGERIEKVE HSDLSFSKDW SFYLLYYTEF TPTEKDEYAC RVNHVTLSQP KIVKWDRDM (SEQ ID NO:128). In some cases, a β2M polypeptide comprises the amino acid sequence: IQRTPKIQVY SCHPAENGKS NFLNCYVSGF HPSDIEVDLLKNGERIEKVE HSDLSFSKDW SFYLLYYTEF TPTEKDEYAC RVNHVTLSQP KIVKWDRDM (SEQ ID NO:129).

[0140] In some cases, an HLA Class I heavy chain polypeptide comprises the amino acid sequence:

(SEQ ID NO: 130)
[sequence omitted]

[0141] In some cases, an HLA Class I heavy chain polypeptide comprises the amino acid sequence:

(SEQ ID NO: 131)
GSHSMRYFFTSVSRPGRGEPRFIAVGYVDDTQFVRFDSDAASQRMEPRAP
WIEQEGPEYWDGETRKVKAHSQTHRVDLGTLRGYYNQSEAGSHTVQRMYG
CDVGSDWRFLRGYHQYAYDGKDYIALKEDLRSWTAADMAAQTTKHKWEAA
HVAEQLRAYLEGTCVEWLRRYLENGKETLQRTDAPKTHMTHHAVSDHEAT
LRCWALSFYPAEITLTWQRDGEDQTQDTELVETRPCGDGTFQKWAAVVVP
SGQEQRYTCHVQHEGLPKPLTLRWEP.

[0142] In some cases, an HLA Class I heavy chain polypeptide comprises the amino acid sequence:

(SEQ ID NO: 132)
GSHSMRYFFTSVSRPGRGEPRFIAVGYVDDTQFVRFDSDAASQRMEPRAP
WIEQEGPEYWDGETRKVKAHSQTHRVDLGTLRGAYNQSEAGSHTVQRMYG
CDVGSDWRFLRGYHQYAYDGKDYIALKEDLRSWTAADMAAQTTKHKWEAA
HVAEQLRAYLEGTCVEWLRRYLENGKETLQRTDAPKTHMTHHAVSDHEAT
LRCWALSFYPAEITLTWQRDGEDQTQDTELVETRPCGDGTFQKWAAVVVP
SGQEQRYTCHVQHEGLPKPLTLRWE.

[0143] In some cases, the β2M polypeptide comprises the following amino acid sequence:

[0144] IQRTPKIQVY SCHPAENGKS NFLNCYVSGF HPSDIEVDLLKNGERIEKVE HSDLSFSKDW SFYLLYYTEF TPTEKDEYAC RVNHVTLSQP KIVKWDRDM (SEQ ID NO:133); and the HLA Class I heavy chain polypeptide of a TMMP of the present disclosure comprises the following amino acid sequence:

[0145] GSHSMRYFFTSVSRPGRGEPRFIAVGYVDDTQFVRFDSDAASQRMEPRAPWIEQE GPEYWDGETRKVKAHSQTHRVDLGTLRGYYNQSEAGSHTVQRMYGCDVGSDWRFLRGYHQY AYDGKDYIALKEDLRSWTAADMAAQTTKHKWEAAHVAEQLRAYLEGTCVEWLRRYLENGKE TLQRTDAPKTHMTHHAVSDHEATLRCWALSFYPAEITLTWQRDGEDQTQDTELVETRPCGDGT FQKWAAVVVPSGQEQRYTCHVQHEGLPKPLTLRWEP (SEQ ID NO:134), where the Cys residues that are underlined and in bold form a disulfide bond with one another in the TMMP.

[0146] In some cases, the β2M polypeptide comprises the amino acid sequence:

(SEQ ID NO: 135)
IQRTPKIQVYSCHPAENGKSNFLNCYVSGFHPSDIEVDLLKNGERIEKVE
HSDLSFSKDWSFYLLYYTEFTPTEKDENACRVNHVTLSQPKIVKWDRDM.

[0147] In some cases, the first polypeptide and the second polypeptide of a TMMP of the present disclosure are disulfide linked to one another through: i) a Cys residue present in a linker connecting the peptide epitope and a β2M polypeptide in the first polypeptide chain; and ii) a Cys residue present in an MHC Class I heavy chain in the second polypeptide chain. In some cases, the Cys residue present in the MHC Class I heavy chain is a Cys introduce as a Y84C substitution. In some cases, the linker connecting the peptide epitope and the β2M polypeptide in the first polypeptide chain is GCGGS(G4S)n (SEQ ID NO:136), where n is 1, 2, 3, 4, 5, 6, 7, 8, or 9. For example, in some cases, the linker comprises the amino acid sequence GCGGSGGGGSGGGGSGGGGS (SEQ ID NO:137). As another example, the linker comprises the amino acid sequence GCGGSGGGGSGGGGS (SEQ ID NO:138). Examples of disulfide-linked first and second polypeptides of a TMMP of the present disclosure are depicted schematically in FIG. 2A-2F.

### Multiple Disulfide Bonded TMMPs

[0148] In some cases, the first polypeptide and the second polypeptide of a TMMP of the present disclosure are linked to one another by at least two disulfide bonds (i.e., two interchain disulfide bonds). Examples of such multiple disulfide-linked TMMP are depicted schematically in FIGS. 12A and 12B. In addition, where a TMMP of the present disclosure comprises an IgFc polypeptide, a heterodimeric TMMP can be dimerized, such that disulfide bonds link the IgFc polypeptides in the two heterodimeric TMMPs. Such an arrangement is depicted schematically in FIGS. 12C and 12D, where disulfide bonds are represented by dashed lines. Unless otherwise stated, the at least two disulfide bonds described in the multiple disulfide-linked TMMPPs in this section are not referring to disulfide bonds linking IgFc polypeptides in dimerized TMMPs.

[0149] As noted above, in some cases, the first polypeptide and the second polypeptide of a TMMP of the present disclosure are linked to one another by at least two disulfide bonds (i.e., two interchain disulfide bonds). For example, in some instances, the first polypeptide and the second polypeptide of a TMMP of the present disclosure are linked to one another by 2 interchain disulfide bonds. As another example, in some instances, the first polypeptide and the second polypeptide of a TMMP of the present disclosure are linked to one another by 3 interchain disulfide bonds. As another example, in some instances, the first polypeptide and the second polypeptide of a TMMP of the present disclosure are linked to one another by 4 interchain disulfide bonds.

[0150] In some cases where a peptide epitope in a first polypeptide of a TMMP of the present disclosure is linked to a β2M polypeptide by a linker comprising a Cys, at least one of the at least two disulfide bonds links a Cys in the linker to a Cys in an MHC Class I heavy chain in the second polypeptide. In some cases, where a peptide epitope in a first polypeptide of a TMMP of the present disclosure is linked to an MHC Class I heavy chain polypeptide by a linker, at least one of the at least two disulfide bonds links a Cys in the linker to a Cys in a β2M polypeptide present in the second polypeptide.

[0151] In some cases, a multiple disulfide-linked TMMP of the present disclosure (e.g., a double disulfide-linked TMMP) exhibits increased stability, compared to a control TMMP that includes only one of the at least two disulfide bonds. In some cases, a multiple disulfide-linked TMMP (e.g., a double disulfide-linked TMMP) of the present disclosure exhibits increased in vitro stability, compared to a control TMMP that includes only one of the at least two disulfide bonds. For example, in some cases, a multiple disulfide-linked TMMP of the present disclosure (e.g., a double disulfide-linked TMMP) exhibits at least 5%, at least 10%, at least 15%, at least 20%, at least 25%, at least 50%, at least 2-fold, at least 5-fold, or at least 10-fold, greater in vitro stability, compared to a control TMMP that includes only one of the at least two disulfide bonds.

[0152] Whether a multiple disulfide-linked TMMP of the present disclosure exhibits increased in vitro stability, compared to a control TMMP that includes only one of the at least two disulfide bonds, can be determined by measuring the amount disulfide-linked heterodimeric TMMP present in a sample over time and/or under a specified condition and/or during purification of the TMMP.

[0153] For example, in some cases, a multiple disulfide-linked TMMP (e.g., a double disulfide-linked TMMP) of the present disclosure exhibits at least 5%, at least 10%, at least 15%, at least 20%, at least 25%, at least 50%, at least 2-fold, at least 5-fold, or at least 10-fold, greater in vitro stability, compared to a control TMMP that includes only one of the at least two disulfide bonds, when the TMMP is stored at 37° C. for a period of time (e.g., for a period of time of from about 1 week to about 2 weeks, from about 2 weeks to about 4 weeks, or from about 4 weeks to about 2 months). For example, in some cases, the amount of disulfide-linked heterodimeric TMMP remaining after storing a multiple disulfide-linked TMMP (e.g., a double disulfide-linked TMMP) of the present disclosure in vitro at 37° C. for 28 days is at least at least 5%, at least 10%, at least 15%, at least 20%, at least 25%, at least 50%, at least 2-fold, at least 5-fold, or at least 10-fold, greater than the amount of disulfide-linked heterodimeric TMMP remaining after storing a control TMMP (a TMMP that includes only one of the at least two disulfide bonds present in the multiple disulfide-linked TMMP) in vitro at 37° C. for 28 days.

[0154] In some cases, a multiple disulfide-linked TMMP of the present disclosure exhibits increased in vivo stability, compared to a control TMMP that includes only one of the at least two disulfide bonds. For example, in some cases, a multiple disulfide-linked TMMP of the present disclosure exhibits at least 5%, at least 10%, at least 15%, at least 20%, at least 25%, at least 50%, at least 2-fold, at least 5-fold, or at least 10-fold, greater in vivo stability, compared to a control TMMP that includes only one of the at least two disulfide bonds.

[0155] In some cases, the presence of two disulfide bonds in a multiple disulfide-linked TMMP of the present disclosure (e.g., a double disulfide-linked TMMP) provides for increased production of disulfide-linked heterodimeric TMMP, compared to the amount of disulfide-linked heterodimeric TMMP produced when the TMMP is a control TMMP that includes only one of the at least two disulfide bonds. For example, a multiple disulfide-linked TMMP of the present disclosure (e.g., a double disulfide-linked TMMP) can be produced in a mammalian cell in in vitro cell culture, where the mammalian cell is cultured in a liquid cell culture medium. The TMMP can be secreted into the cell culture medium. The cells can be lysed, generating a cell lysate, and the TMMP can be present in the cell lysate. The TMMP can be purified from the cell culture medium and/or the cell lysate. For example, where the TMMP comprises an IgG1 Fc polypeptide, the cell culture medium and/or the cell lysate can be contacted with immobilized protein A (e.g., the cell culture medium and/or the cell lysate can be applied to a protein A column, where protein A is immobilized onto beads). TMMP present in the cell culture medium and/or the cell lysate becomes bound to the immobilized protein A. After washing the column to remove unbound materials, the bound TMMP is eluted, generating a protein A eluate. The amount of disulfide-linked heterodimeric TMMP present in the protein A eluate is a least 0.5%, at least 1%, at least 2%, at least 3%, at least 4%, at least 5%, at least 6%, at least 7%, at least 8%, at least 9%, or at least 10%, higher than the amount of disulfide-linked heterodimeric TMMP present in the protein A eluate when the TMMP is a control TMMP that includes only one of the at least two disulfide bonds present in the multiple disulfide-linked TMMP (e.g., a double disulfide-linked TMMP). In some cases, the percent of the total TMMP protein in the eluate that is non-aggregated disulfide-linked heterodimeric TMMP is at least 70%, at least 75%, at least 80%, at least 85%, at least 90%, at least 95%, or at least 99%. The protein A eluate can be subjected to size exclusion chromatography (SEC) and/or one or more other additional purification steps.

[0156] In some cases, a T-cell modulatory multimeric polypeptide of the present disclosure comprises at least one heterodimer comprising: a) a first polypeptide comprising: i) a MUC1 peptide, where the MUC1 peptide has a length of at least 4 amino acids, e.g., from 4 amino acids to about 25 amino acids (e.g., 4 amino acids (aa), 5 aa, 6 aa, 7 aa, 8 aa, 9 aa, 10 aa, 11 aa, 12 aa, 13 aa, 14 aa, 15 aa, 16 aa, 17 aa, 18 aa, 19 aa, 20 aa, 21 aa, 22 aa, 23 aa, 24 aa, or 25 aa, and peptides within a range of from 4 to 20 amino acids, from 6 to 18 amino acids, from 8 to 15 amino acids, from 8 to 12 amino acids, from 5 to 10 amino acids, from 10 to 20 amino acids, and from 15 to 25 amino acids in length); and ii) first MHC polypeptide; b) a second polypeptide comprising a second MHC polypeptide, and c) at least one immunomodulatory polypeptide, where the first and/or the second polypeptide comprises the immunomodulatory polypeptide, and where the heterodimer comprises at least two disulfide bonds (e.g., two disulfide bonds) between the first polypeptide and the second polypeptide (e.g., the heterodimer comprises: i) a first disulfide bond linking the first polypeptide and the second polypeptide; and ii) a second disulfide bond linking the first polypeptide and the second polypeptide). Expressed another way, the first polypeptide comprises a first Cys residue that forms a disulfide bond (a first disulfide bond) with a first Cys residue in the second polypeptide; and the first polypeptide comprises a second Cys residue that forms a disulfide bond (a second disulfide bond) with a second Cys residue in the second polypeptide.

[0157] In some cases, a TMMP of the present disclosure comprises: a) a first polypeptide comprising, in order from N-terminus to C-terminus: i) a MUC1 peptide; ii) a peptide linker; and iii) a β2M polypeptide; and b) a second polypeptide comprising an MHC Class I heavy chain polypeptide, where one or both of the first and the second polypeptides comprises at least one immunomodulatory polypeptide, where the TMMP comprises: a) a first disulfide linkage between: i) a Cys present in the linker between the MUC1 peptide and the β2M polypeptide; and ii) a first Cys introduced into the MHC Class I heavy chain polypeptide; and b) at least a second disulfide linkage between the first polypeptide and the second polypeptide, where the at least a second disulfide linkage is between: i) a Cys in the first polypeptide that is C-terminal to the Cys present in the linker; and ii) a Cys in the second polypeptide that is C-terminal to the first Cys introduced into the MHC Class I heavy chain polypeptide.

[0158] In some cases, a first and a second disulfide bond-forming Cys residues in a first or a second polypeptide of a TMMP of the present disclosure are from about 10 amino acids to about 200 amino acids apart from one another. For example, in some cases, a first and a second disulfide bond-forming Cys residues in a first or a second polypeptide of a TMMP are from about 10 amino acids (aa) to about 15 aa, from about 15 aa to about 20 aa, from about 20 aa to about 25 aa, from about 25 aa to about 30 aa, from about 30 aa to about 40 aa, from about 40 aa to about 50 aa, from about 50 aa to about 60 aa, from about 60 aa to about 70 aa, from about 70 aa to about 80 aa, from about 80 aa to about 90 aa, from about 90 aa to about 100 aa, from about 100 aa to about 110 aa, from about 110 aa to about 120 aa, from about 120 aa to about 130 aa, from about 130 aa to about 140 aa, from about 140 aa to about 150 aa, from about 150 aa to about 160 aa, from about 160 aa to about 170 aa, from about 170 aa to about 180 aa, from about 180 aa to about 190 aa, or from about 190 aa to about 200 aa.

[0159] As an example, in some cases, the first and second disulfide bond-forming Cys residues in the first polypeptide of a TMMP of the present disclosure are from about 10 amino acids to about 80 amino acid residues apart from one another. For example, in some cases, the second disulfide bond-forming Cys residue in the first polypeptide is from about 10 amino acids to about 80 amino acids (e.g., from about 10 amino acids (aa) to about 15 aa, from about 15 aa to about 20 aa, from about 20 aa to about 25 aa, from about 25 aa to about 30 aa, from about 30 aa to about 40 aa, from about 40 aa to about 50 aa, from about 50 aa to about 60 aa, from about 60 aa to about 70 aa, or from about 70 aa to about 80 aa) C-terminal to the first disulfide bond-forming Cys residue in the first polypeptide. In some cases, the second disulfide bond-forming Cys residue in the first polypeptide is 10 aa, 11 aa, 12 aa, 13 aa, 14 aa, 15 aa, 16 aa, 17 aa, 18 aa, 19 aa, 20 aa, 21 aa, 22 aa, 23 aa, 24 aa, or 25 aa, C-terminal to the first disulfide bond-forming Cys residue in the first polypeptide. In some cases, the second disulfide bond-forming Cys residue in the first polypeptide is 15 aa C-terminal to the first disulfide bond-forming Cys residue in the first polypeptide. In some cases, the second disulfide bond-forming Cys residue in the first polypeptide is 20 aa C-terminal to the first disulfide bond-forming Cys residue in the first polypeptide. In some cases, the second disulfide bond-forming Cys residue in the first polypeptide is 25 aa C-terminal to the first disulfide bond-forming Cys residue in the first polypeptide.

[0160] As another example, in some cases, the first and second disulfide bond-forming Cys residues in the second polypeptide of a TMMP of the present disclosure are from about 140 amino acids to about 160 amino acids apart from one another. For example, in some cases, the second disulfide bond-forming Cys residue in the second polypeptide is from about 140 amino acids to about 160 amino acids C-terminal to the first disulfide bond-forming Cys residue in the second polypeptide. In some cases, the second disulfide bond-forming Cys residue in the second polypeptide is 140 amino acids (aa), 141 aa, 142 aa, 143 aa, 144 aa, 145 aa, 146 aa, 147 aa, 148 aa, 149 aa, 150 aa, 151 aa, 152 aa, 153 aa, 154 aa, 155 aa, 156 aa, 157 aa, 158 aa, 159 aa, or 160 aa, C-terminal to the first disulfide bond-forming Cys residue in the second polypeptide.

[0161] A multiple disulfide-linked TMMP of the present disclosure (e.g., a double disulfide-linked TMMP) can comprise, for example: a) a first polypeptide comprising: i) a MUC1 peptide (e.g., a MUC1 peptide of from 4 amino acids to about 25 amino acids in length, that is bound by a TCR when the peptide is complexed with MHC polypeptides); and ii) a first MHC polypeptide, where the first polypeptide comprises a peptide linker between the MUC1 peptide and the first MHC polypeptide, where the peptide linker comprises a Cys residue, and where the first MHC polypeptide is a β2M polypeptide that comprises an amino acid substitution that introduces a Cys residue; b) and a second polypeptide comprising a second MHC polypeptide, where the second MHC polypeptide is a Class I heavy chain comprising a Y84C substitution and an A236C substitution, based on the amino acid numbering of HLA-A*0201 (depicted in FIG. 7A), or at corresponding positions in another Class I heavy chain allele, where the TMMP comprises a disulfide bond between the Cys residue in the peptide linker and the Cys residue at amino acid position 84 of the Class I heavy chain or corresponding position of another Class I heavy chain allele, and where the TMMP comprises a disulfide bond between the introduced Cys residue in the β2M polypeptide and the Cys at amino acid position 236 of the Class I heavy chain or corresponding position of another Class I heavy chain allele; and c) at least one immunomodulatory polypeptide, where the first and/or the second polypeptide comprises the at least one immunomodulatory polypeptide. Examples are depicted schematically in FIG. 12A and FIG. 12B.

[0162] In some cases, the peptide linker comprises the amino acid sequence GCGGS (SEQ ID NO:139). In some cases, the peptide linker comprises the amino acid sequence GCGGS(GGGGS)n (SEQ ID NO: 140), where n is an integer from 1 to 10. In some cases, the peptide linker comprises the amino acid sequence GCGGS(GGGGS)n (SEQ ID NO: 140), where n is 1. In some cases, the peptide linker comprises the amino acid sequence GCGGS(GGGGS)n (SEQ ID NO: 140), where n is 2. In some cases, the peptide linker comprises the amino acid sequence GCGGS(GGGGS)n (SEQ ID NO: 140), where n is 3. In some cases, the peptide linker comprises the amino acid sequence GCGGS(GGGGS)n (SEQ ID NO: 140), where n is 4. In some cases, the peptide linker comprises the amino acid sequence GCGGS(GGGGS)n (SEQ ID NO: 140), where n is 5. In some cases, the peptide linker comprises the amino acid sequence GCGGS(GGGGS)n (SEQ ID NO: 140), where n is 6. In some cases, the peptide linker comprises the amino acid sequence GCGGS(GGGGS)n (SEQ ID NO: 140), where n is 7. In some cases, the peptide linker comprises the amino acid sequence GCGGS(GGGGS)n (SEQ ID NO: 140), where n is 8. In some cases, the peptide linker comprises the amino acid sequence GCGGS(GGGGS)n (SEQ ID NO: 140), where n is 9. In some cases, the peptide linker comprises the amino acid sequence GCGGS(GGGGS)n (SEQ ID NO: 140), where n is 10.

[0163] In some cases, the peptide linker comprises the amino acid sequence CGGGS (SEQ ID NO:141). In some cases, the peptide linker comprises the amino acid sequence CGGGS(GGGGS)n (SEQ ID NO: 142), where n is an integer from 1 to 10. In some cases, the peptide linker comprises the amino acid sequence CGGGS(GGGGS)n (SEQ ID NO: 142), where n is 1. In some cases, the peptide linker comprises the amino acid sequence CGGGS(GGGGS)n (SEQ ID NO: 142), where n is 2. In some cases, the peptide linker comprises the amino acid sequence CGGGS(GGGGS)n (SEQ ID NO: 142), where n is 3. In some cases, the peptide linker comprises the amino acid sequence CGGGS(GGGGS)n (SEQ ID NO: 142), where n is 4. In some cases, the peptide linker comprises the amino acid sequence CGGGS(GGGGS)n (SEQ ID NO: 142), where n is 5. In some cases, the peptide linker comprises the amino acid sequence CGGGS(GGGGS)n (SEQ ID NO: 142), where n is 6. In some cases, the peptide linker comprises the amino acid sequence CGGGS(GGGGS)n (SEQ ID NO: 142), where n is 7. In some cases, the peptide linker comprises the amino acid sequence CGGGS(GGGGS)n (SEQ ID NO: 142), where n is 8. In some cases, the peptide linker comprises the amino acid sequence CGGGS(GGGGS)n (SEQ ID NO: 142), where n is 9. In some cases, the peptide linker comprises the amino acid sequence CGGGS(GGGGS)n (SEQ ID NO: 142), where n is 10.

[0164] The following are non-limiting examples of MHC Class I heavy chain comprising a Y84C substitution and an A236C substitution, based on the amino acid numbering of HLA-A*0201 (depicted in FIG. 7A), or at corresponding positions in another Class I heavy chain allele.

### HLA-A

[0165] In some cases, a multiple disulfide-linked TMMP of the present disclosure (e.g., a double disulfide-linked TMMP) comprises: a) a first polypeptide comprising: i) a MUC1 peptide (e.g., a MUC1 peptide of from 4 amino acids to 25 amino acids in length, that is bound by a TCR when the peptide is complexed with MHC polypeptides); and ii) a first MHC polypeptide, where the first polypeptide comprises a peptide linker between the peptide and the first MHC polypeptide, where the peptide linker comprises a Cys residue, and where the first MHC polypeptide is a β2M polypeptide that comprises an amino acid substitution that introduces a Cys residue; and b) a second polypeptide comprising an HLA-A MHC Class I heavy chain comprising an amino acid sequence having at least 60%, at least 70%, at least 80%, at least 90%, at least 95%, at least 98%, at least 99%, or 100%, amino acid sequence identity to the following amino acid sequence: GSHSMRYFFTSVSRPGRGEPRFIAVGYVDDTQFVRFDSDAASQRMEPRAPWIEQEGPEYWDGET RKVKAHSQTHRVDLGTLRGCYNQSEAGSHTVQRMYGCDVGSDWRFLRGYHQYAYDGKDYIA LKEDLRSWTAADMAAQTTKHKWEAAHVAEQLRAYLEGTCVEWLRRYLENGKETLQRTDAPK THMTHHAVSDHEATLRCWALSFYPAEITLTWQRDGEDQTQDTELVETRPCGDGTFQKWAAVV VPSGQEQRYTCHVQHEGLPKPLTLRWEP (SEQ ID NO:143), where amino acid 84 is a Cys and amino acid 236 is a Cys; and c) at least one immunomodulatory polypeptide, where the first and/or the second polypeptide comprises the at least one immunomodulatory polypeptide. In some cases, the peptide linker comprises the amino acid sequence GCGGS (SEQ ID NO:139). In some cases, the peptide linker comprises the amino acid sequence GCGGS(GGGGS)n (SEQ ID NO: 140), where n is an integer from 1 to 10. In some cases, the β2M polypeptide comprises an R12C substitution. For example, the β2M polypeptide can comprises an amino acid sequence having at least 90%, at least 95%, at least 98%, at least 99%, or 100%, amino acid sequence identity to the following amino acid sequence: IQRTPKIQVYSCHPAENGKSNFLNCYVSGFHPSDIEVDLLKNGERIEKVEHSDLSFSKDWSFYLL YYTEFTPTEKDEYACRVNHVTLSQPKIVKWDRDM (SEQ ID NO:144), where amino acid 12 is a Cys. The at least one immunomodulatory polypeptide can be a cytokine, a 4-1BBL polypeptide, a B7-1 polypeptide; a B7-2 polypeptide, an ICOS-L polypeptide, an OX-40L polypeptide, a CD80 polypeptide, a CD86 polypeptide, a PD-L1 polypeptide, a FasL polypeptide, or a PD-L2 polypeptide. In some cases, the at least one immunomodulatory polypeptide is a reduced affinity variant, as described elsewhere herein. In some cases, the first or the second polypeptide comprises an Ig Fc polypeptide.

[0166] In some cases, a multiple disulfide-linked TMMP of the present disclosure (e.g., a double disulfide-linked TMMP) comprises an HLA-A Class I heavy chain polypeptide. In some cases, the HLA-A heavy chain polypeptide present in a multiple disulfide-linked TMMP of the present disclosure (e.g., a double disulfide-linked TMMP) comprises an amino acid sequence having at least 95%, at least 98%, or at least 99%, amino acid sequence identity to the HLA-A*0101, HLA-A*0201, HLA-A*0202, HLA-A*1101, HLA-A*2301, HLA-A*2402, HLA-A*2407, HLA-A*3303, or HLA-A*3401 amino acid sequence depicted in FIG. 7A, where the HLA-A heavy chain polypeptide comprises Y84C and A236C substitutions.

### HLA-A*0101 (Y84C; A236C)

[0167] In some cases, the HLA-A heavy chain polypeptide present in a multiple disulfide-linked TMMP of the present disclosure (e.g., a double disulfide-linked TMMMP) comprises an amino acid sequence having at least 95%, at least 98%, at least 99%, or 100%, amino acid sequence identity to the following HLA-A*0101 (Y84C; A236C) amino acid sequence:

[0168] GSHSMRYFFTSVSRPGRGEPRFIAVGYVDDTQFVRFDSDAASQKMEPRAPWIEQE GPEYWDQETRNMKAHSQTDRANLGTLRGCYNQSEDGSHTIQIMYGCDVGPDGRFLRGYRQDA YDGKDYIALNEDLRSWTAADMAAQITKRKWEAVHAAEQRRVYLEGRCVDGLRRYLENGKET LQRTDPPKTHMTHHPISDHEATLRCWALGFYPAEITLTWQRDGEDQTQDTELVETRPCGDGTF QKWAAVVVPSGEEQRYTCHVQHEGLPKPLTLRWE (SEQ ID NO:145), where amino acid 84 is a Cys and amino acid 236 is a Cys.

### HLA-A*0201 (Y84C; A236C)

[0169] In some cases, the HLA-A heavy chain polypeptide present in a multiple disulfide-linked TMMP of the present disclosure (e.g., a double disulfide-linked TMMP) comprises an amino acid sequence having at least 95%, at least 98%, at least 99%, or 100%, amino acid sequence identity to the following HLA-A*0201 (Y84C; A236C) amino acid sequence: GSHSMRYFFTSVSRPGRGEPRFIAVGYVDDTQFVRFDSDAASQRMEPRAPWIEQEGPEYWDGET RKVKAHSQTHRVDLGTLRGCYNQSEAGSHTVQRMYGCDVGSDWRFLRGYHQYAYDGKDYIA LKEDLRSWTAADMAAQTTKHKWEAAHVAEQLRAYLEGTCVEWLRRYLENGKETLQRTDAPK THMTHHAVSDHEATLRCWALSFYPAEITLTWQRDGEDQTQDTELVETRPCGDGTFQKWAAVV VPSGQEQRYTCHVQHEGLPKPLTLRWEP (SEQ ID NO:146), where amino acid 84 is a Cys and amino acid 236 is a Cys.

### HLA-A*0202 (Y84C; A236C)

[0170] In some cases, the HLA-A heavy chain polypeptide present in a multiple disulfide-linked TMMP of the present disclosure (e.g., a double disulfide-linked TMMP) comprises an amino acid sequence having at least 95%, at least 98%, at least 99%, or 100%, amino acid sequence identity to the following HLA-A*0202 (Y84C; A236C) amino acid sequence: GSHSMRYFFTSVSRPGRGEPRFIAVGYVDDTQFVRFDSDAASQRMEPRAPWIEQEGPEYWDGET RKVKAHSQTHRVDLGTLRGCYNQSEAGSHTVQRMYGCDVGSDWRFLRGYHQYAYDGKDYIA LKEDLRSWTAADMAAQTTKHKWEAAHVAEQLRAYLEGTCVEWLRRYLENGKETLQRTDAPK THMTHHAVSDHEATLRCWALSFYPAEITLTWQRDGEDQTQDTELVETRPCGDGTFQKWAAVV VPSGQEQRYTCHVQHEGLPKPLTLRWE (SEQ ID NO:147), where amino acid 84 is a Cys and amino acid 236 is a Cys.

### HLA-A*1101 (Y84C; A236C)

[0171] In some cases, the HLA-A heavy chain polypeptide present in a multiple disulfide-linked TMMP of the present disclosure (e.g., a double disulfide-linked TMMP) comprises an amino acid sequence having at least 95%, at least 98%, at least 99%, or 100%, amino acid sequence identity to the following HLA-A*1101 (Y84C; A236C) amino acid sequence: GSHSMRYFYTSVSRPGRGEPRFIAVGYVDDTQFVRFDSDAASQRMEPRAPWIEQEGPEYWDQE TRNVKAQSQTDRVDLGTLRGCYNQSEDGSHTIQIMYGCDVGPDGRFLRGYRQDAYDGKDYIA LNEDLRSWTAADMAAQITKRKWEAAHAAEQQRAYLEGRCVEWLRRYLENGKETLQRTDPPK THMTHHPISDHEATLRCWALGFYPAEITLTWQRDGEDQTQDTELVETRPCGDGTFQKWAAVV VPSGEEQRYTCHVQHEGLPKPLTLRWE (SEQ ID NO:148), where amino acid 84 is a Cys and amino acid 236 is a Cys.

### HLA-A*2301 (Y84C; A236C)

[0172] In some cases, the HLA-A heavy chain polypeptide present in a multiple disulfide-linked TMMP of the present disclosure (e.g., a double disulfide-linked TMMP) comprises an amino acid sequence having at least 95%, at least 98%, at least 99%, or 100%, amino acid sequence identity to the following HLA-A*2301 (Y84C; A236C) amino acid sequence: GSHSMRYFSTSVSRPGRGEPRFIAVGYVDDTQFVRFDSDAASQRMEPRAPWIEQEGPEYWDEET GKVKAHSQTDRENLRIALRCYNQSEAGSHTLQMMFGCDVGSDGRFLRGYHQYAYDGKDYIAL KEDLRSWTAADMAAQITQRKWEAARVAEQLRAYLEGTCVDGLRRYLENGKETLQRTDPPKTH MTHHPISDHEATLRCWALGFYPAEITLTWQRDGEDQTQDTELVETRPCGDGTFQKWAAVVVPS GEEQRYTCHVQHEGLPKPLTLRWE (SEQ ID NO:149), where amino acid 84 is a Cys and amino acid 236 is a Cys.

### HLA-A*2402 (Y84C; A236C)

[0173] In some cases, the HLA-A heavy chain polypeptide present in a multiple disulfide-linked TMMP of the present disclosure (e.g., a double disulfide-linked TMMP) comprises an amino acid sequence having at least 95%, at least 98%, at least 99%, or 100%, amino acid sequence identity to the following HLA-A*2402 (Y84C; A236C) amino acid sequence: GSHSMRYFSTSVSRPGRGEPRFIAVGYVDDTQFVRFDSDAASQRMEPRAPWIEQEGPEYWDEET GKVKAHSQTDRENLRIALRCYNQSEAGSHTLQMMFGCDVGSDGRFLRGYHQYAYDGKDYIAL KEDLRSWTAADMAAQITKRKWEAAHVAEQQRAYLEGTCVDGLRRYLENGKETLQRTDPPKT HMTHHPISDHEATLRCWALGFYPAEITLTWQRDGEDQTQDTELVETRPCGDGTFQKWAAVVV PSGEEQRYTCHVQHEGLPKPLTLRWE (SEQ ID NO:150), where amino acid 84 is a Cys and amino acid 236 is a Cys.

### HLA-A*2407 (Y84C; A236C)

[0174] In some cases, the HLA-A heavy chain polypeptide present in a multiple disulfide-linked TMMP of the present disclosure (e.g., a double disulfide-linked TMMP) comprises an amino acid sequence having at least 95%, at least 98%, at least 99%, or 100%, amino acid sequence identity to the following HLA-A*2407 (Y84C; A236C) amino acid sequence: GSHSMRYFSTSVSRPGRGEPRFIAVGYVDDTQFVRFDSDAASQRMEPRAPWIEQEGPEYWDEET GKVKAQSQTDRENLRIALRCYNQSEAGSHTLQMMFGCDVGSDGRFLRGYHQYAYDGKDYIAL KEDLRSWTAADMAAQITKRKWEAAHVAEQQRAYLEGTCVDGLRRYLENGKETLQRTDPPKT HMTHHPISDHEATLRCWALGFYPAEITLTWQRDGEDQTQDTELVETRPCGDGTFQKWAAVVV PSGEEQRYTCHVQHEGLPKPLTLRWE (SEQ ID NO:151), where amino acid 84 is a Cys and amino acid 236 is a Cys.

### HLA-A*3303 (Y84C; A236C)

[0175] In some cases, the HLA-A heavy chain polypeptide present in a multiple disulfide-linked TMMP of the present disclosure (e.g., a double disulfide-linked TMMP) comprises an amino acid sequence having at least 95%, at least 98%, at least 99%, or 100%, amino acid sequence identity to the following HLA-A*3303 (Y84C; A236C) amino acid sequence:

[0176] GSHSMRYFTTSVSRPGRGEPRFIAVGYVDDTQFVRFDSDAASQRMEPRAPWIEQE GPEYWDRNTRNVKAHSQIDRVDLGTLRGCYNQSEAGSHTIQMMYGCDVGSDGRFLRGYQQD AYDGKDYIALNEDLRSWTAADMAAQITQRKWEAARVAEQLRAYLEGTCVEWLRRYLENGKE TLQRTDPPKTHMTHHAVSDHEATLRCWALSFYPAEITLTWQRDGEDQTQDTELVETRPCGDGT FQKWASVVVPSGQEQRYTCHVQHEGLPKPLTLRWE (SEQ ID NO:152), where amino acid 84 is a Cys and amino acid 236 is a Cys.

### HLA-A*3401 (Y84C; A236C)

[0177] In some cases, the HLA-A heavy chain polypeptide present in a multiple disulfide-linked TMMP of the present disclosure (e.g., a double disulfide-linked TMMP) comprises an amino acid sequence having at least 95%, at least 98%, at least 99%, or 100%, amino acid sequence identity to the following HLA-A*3401 (Y84C; A236C) amino acid sequence: GSHSMRYFYTSVSRPGRGEPRFIAVGYVDDTQFVRFDSDAASQRMEPRAPWIEQEGPEYWDRN TRKVKAQSQTDRVDLGTLRGCYNQSEDGSHTIQRMYGCDVGPDGRFLRGYQQDAYDGKDYIA LNEDLRSWTAADMAAQITQRKWETAHEAEQWRAYLEGTCVEWLRRYLENGKETLQRTDAPK THMTHHAVSDHEATLRCWALSFYPAEITLTWQRDGEDQTQDTELVETRPCGDGTFQKWASVV VPSGQEQRYTCHVQHEGLPKPLTLRWE (SEQ ID NO:153), where amino acid 84 is a Cys and amino acid 236 is a Cys.

### HLA-B

[0178] In some cases, a multiple disulfide-linked TMMP of the present disclosure (e.g., a double disulfide-linked TMMP) comprises: a) a first polypeptide comprising: i) a MUC1 peptide of at least 4 amino acids in length (e.g., a MUC1 peptide of from 4 amino acids to about 25 amino acids in length), that is bound by a TCR when the peptide is complexed with MHC polypeptides); and ii) a first MHC polypeptide, where the first polypeptide comprises a peptide linker between the peptide and the first MHC polypeptide, where the peptide linker comprises a Cys residue, and where the first MHC polypeptide is a β2M polypeptide that comprises an amino acid substitution that introduces a Cys residue; and b) a second polypeptide comprising an HLA-B MHC Class I heavy chain comprising an amino acid sequence having at least 60%, at least 70%, at least 80%, at least 90%, at least 95%, at least 98%, at least 99%, or 100%, amino acid sequence identity to the following amino acid sequence: GSHSMRYFYTSVSRPGRGEPRFISVGYVDDTQFVRFDSDAASPREEPRAPWIEQEGPEYWDRNT QIYKAQAQTDRESLRNLRGCYNQSEAGSHTLQSMYGCDVGPDGRLLRGHDQYAYDGKDYIAL NEDLRSWTAADTAAQITQRKWEAAREAEQRRAYLEGECVEWLRRYLENGKDKLERADPPKTH VTHHPISDHEATLRCWALGFYPAEITLTWQRDGEDQTQDTELVETRPCGDRTFQKWAAVVVPS GEEQRYTCHVQHEGLPKPLTLRWEP (SEQ ID NO:154), where amino acid 84 is a Cys and amino acid 236 is a Cys; and c) at least one immunomodulatory polypeptide, where the first and/or the second polypeptide comprises the at least one immunomodulatory polypeptide. In some cases, the peptide linker comprises the amino acid sequence GCGGS (SEQ ID NO:139). In some cases, the peptide linker comprises the amino acid sequence GCGGS(GGGGS)n (SEQ ID NO:140), where n is an integer from 1 to 10. In some cases, the β2M polypeptide comprises an R12C substitution. For example, the β2M polypeptide can comprises an amino acid sequence having at least 90%, at least 95%, at least 98%, at least 99%, or 100%, amino acid sequence identity to the following amino acid sequence: IQRTPKIQVYSCHPAENGKSNFLNCYVSGFHPSDIEVDLLKNGERIEKVEHSDLSFSKDWSFYLL YYTEFTPTEKDEYACRVNHVTLSQPKIVKWDRDM (SEQ ID NO:155), where amino acid 12 is a Cys. The at least one immunomodulatory polypeptide can be a cytokine, a 4-1BBL polypeptide, a B7-1 polypeptide; a B7-2 polypeptide, an ICOS-L polypeptide, an OX-40L polypeptide, a CD80 polypeptide, a CD86 polypeptide, a PD-L1 polypeptide, a FasL polypeptide, or a PD-L2 polypeptide. In some cases, the at least one immunomodulatory polypeptide is a reduced affinity variant, as described elsewhere herein. In some cases, the first or the second polypeptide comprises an Ig Fc polypeptide.

[0179] In some cases, a multiple disulfide-linked TMMP of the present disclosure comprises an HLA-B Class I heavy chain polypeptide. In some cases, the HLA-B heavy chain polypeptide present in a multiple disulfide-linked TMMP of the present disclosure (e.g., a double disulfide-linked TMMP) comprises an amino acid sequence having at least 95%, at least 98%, or at least 99%, amino acid sequence identity to the HLA-B*0702, HLA-B*0801, HLA-B*1502, HLA-B*3802, HLA-B*4001, HLA-B*4601, or HLA-B*5301 amino acid sequence depicted in FIG. 8A, where the HLA-B heavy chain polypeptide comprises Y84C and A236C substitutions.

### HLA-B*0702 (Y84C; A236C)

[0180] In some cases, the HLA-B heavy chain polypeptide present in a multiple disulfide-linked TMMP of the present disclosure (e.g., a double disulfide-linked TMMP) comprises an amino acid sequence having at least 95%, at least 98%, at least 99%, or 100%, amino acid sequence identity to the following HLA-B*0702 (Y84C; A236C) amino acid sequence:

[0181] GSHSMRYFYTSVSRPGRGEPRFISVGYVDDTQFVRFDSDAASPREEPRAPWIEQEG PEYWDRNTQIYKAQAQTDRESLRNLRGCYNQSEAGSHTLQSMYGCDVGPDGRLLRGHDQYAY DGKDYIALNEDLRSWTAADTAAQITQRKWEAAREAEQRRAYLEGECVEWLRRYLENGKDKLE RADPPKTHVTHHPISDHEATLRCWALGFYPAEITLTWQRDGEDQTQDTELVETRPCGDRTFQK WAAVVVPSGEEQRYTCHVQHEGLPKPLTLRWE (SEQ ID NO:156), where amino acid 84 is a Cys and amino acid 236 is a Cys.

### HLA-B*0801 (Y84C; A236C)

[0182] In some cases, the HLA-B heavy chain polypeptide present in a multiple disulfide-linked TMMP of the present disclosure (e.g., a double disulfide-linked TMMP) comprises an amino acid sequence having at least 95%, at least 98%, at least 99%, or 100%, amino acid sequence identity to the following HLA-B*0801 (Y84C; A236C) amino acid sequence:

[0183] GSHSMRYFDTAMSRPGRGEPRFISVGYVDDTQFVRFDSDAASPREEPRAPWIEQE GPEYWDRNTQIFKTNTQTDRESLRNLRGCYNQSEAGSHTLQSMYGCDVGPDGRLLRGHNQYA YDGKDYIALNEDLRSWTAADTAAQITQRKWEAARVAEQDRAYLEGTCVEWLRRYLENGKDTL ERADPPKTHVTHHPISDHEATLRCWALGFYPAEITLTWQRDGEDQTQDTELVETRPCGDRTFQK WAAVVVPSGEEQRYTCHVQHEGLPKPLTLRWE (SEQ ID NO:157), where amino acid 84 is a Cys and amino acid 236 is a Cys.

### HLA-B*1502 (Y84C; A236C)

[0184] In some cases, the HLA-B heavy chain polypeptide present in a multiple disulfide-linked TMMP of the present disclosure (e.g., a double disulfide-linked TMMP) comprises an amino acid sequence having at least 95%, at least 98%, at least 99%, or 100%, amino acid sequence identity to the following HLA-B*1502 (Y84C; A236C) amino acid sequence:

[0185] GSHSMRYFYTAMSRPGRGEPRFIAVGYVDDTQFVRFDSDAASPRMAPRAPWIEQE GPEYWDRNTQISKTNTQTYRESLRNLRGCYNQSEAGSHIIQRMYGCDVGPDGRLLRGYDQSAY DGKDYIALNEDLSSWTAADTAAQITQRKWEAAREAEQLRAYLEGLCVEWLRRYLENGKETLQ RADPPKTHVTHHPISDHEATLRCWALGFYPAEITLTWQRDGEDQTQDTELVETRPCGDRTFQK WAAVVVPSGEEQRYTCHVQHEGLPKPLTLRWE (SEQ ID NO:158), where amino acid 84 is a Cys and amino acid 236 is a Cys.

### HLA-B*3802 (Y84C; A236C)

[0186] In some cases, the HLA-B heavy chain polypeptide present in a multiple disulfide-linked TMMP of the present disclosure (e.g., a double disulfide-linked TMMP) comprises an amino acid sequence having at least 95%, at least 98%, at least 99%, or 100%, amino acid sequence identity to the following HLA-B*3802 (Y84C; A236C) amino acid sequence:

[0187] GSHSMRYFYTSVSRPGRGEPRFISVGYVDDTQFVRFDSDAASPREEPRAPWIEQEG PEYWDRNTQICKTNTQTYRENLRTALRCYNQSEAGSHTLQRMYGCDVGPDGRLLRGHNQFAY DGKDYIALNEDLSSWTAADTAAQITQRKWEAARVAEQLRTYLEGTCVEWLRRYLENGKETLQ RADPPKTHVTHHPISDHEATLRCWALGFYPAEITLTWQRDGEDQTQDTELVETRPCGDRTFQK WAAVVVPSGEEQRYTCHVQHEGLPKPLTLRWE (SEQ ID NO:159), where amino acid 84 is a Cys and amino acid 236 is a Cys.

### HLA-B*4001 (Y84C; A2346C)

[0188] In some cases, the HLA-B heavy chain polypeptide present in a multiple disulfide-linked TMMP of the present disclosure (e.g., a double disulfide-linked TMMP) comprises an amino acid sequence having at least 95%, at least 98%, at least 99%, or 100%, amino acid sequence identity to the following HLA-B*4001 (Y84C; A236C) amino acid sequence:

[0189] GSHSMRYFHTAMSRPGRGEPRFITVGYVDDTLFVRFDSDATSPRKEPRAPWIEQE GPEYWDRETQISKTNTQTYRESLRNLRGCYNQSEAGSHTLQRMYGCDVGPDGRLLRGHNQYA YDGKDYIALNEDLRSWTAADTAAQISQRKLEAARVAEQLRAYLEGECVEWLRRYLENGKDKL ERADPPKTHVTHHPISDHEATLRCWALGFYPAEITLTWQRDGEDQTQDTELVETRPCGDRTFQK WAAVVVPSGEEQRYTCHVQHEGLPKPLTLRWE (SEQ ID NO:160) where amino acid 84 is a Cys and amino acid 236 is a Cys.

### HLA-B*4601 (Y84C; A236C)

[0190] In some cases, the HLA-B heavy chain polypeptide present in a multiple disulfide-linked TMMP of the present disclosure (e.g., a double disulfide-linked TMMP) comprises an amino acid sequence having at least 95%, at least 98%, at least 99%, or 100%, amino acid sequence identity to the following HLA-B*4601 (Y84C; A236C) amino acid sequence:

[0191] GSHSMRYFYTAMSRPGRGEPRFIAVGYVDDTQFVRFDSDAASPRMAPRAPWIEQE GPEYWDRETQKYKRQAQTDRVSLRNLRGCYNQSEAGSHTLQRMYGCDVGPDGRLLRGHDQS AYDGKDYIALNEDLSSWTAADTAAQITQRKWEAAREAEQWRAYLEGLCVEWLRRYLENGKET LQRADPPKTHVTHHPISDHEATLRCWALGFYPAEITLTWQRDGEDQTQDTELVETRPCGDRTFQ KWAAVVVPSGEEQRYTCHVQHEGLPKPLTLRWE (SEQ ID NO:161) where amino acid 84 is a Cys and amino acid 236 is a Cys.

### HLA-B*5301 (Y84C; A236C)

[0192] In some cases, the HLA-B heavy chain polypeptide present in a multiple disulfide-linked TMMP of the present disclosure (e.g., a double disulfide-linked TMMP) comprises an amino acid sequence having at least 95%, at least 98%, at least 99%, or 100%, amino acid sequence identity to the following HLA-B*5301 (Y84C; A236C) amino acid sequence:

[0193] GSHSMRYFYTAMSRPGRGEPRFIAVGYVDDTQFVRFDSDAASPRTEPRAPWIEQE GPEYWDRNTQIFKTNTQTYRENLRIALRCYNQSEAGSHIIQRMYGCDLGPDGRLLRGHDQSAY DGKDYIALNEDLSSWTAADTAAQITQRKWEAARVAEQLRAYLEGLCVEWLRRYLENGKETLQ RADPPKTHVTHHPVSDHEATLRCWALGFYPAEITLTWQRDGEDQTQDTELVETRPCGDRTFQK WAAVVVPSGEEQRYTCHVQHEGLPKPLTLRWE (SEQ ID NO:162) where amino acid 84 is a Cys and amino acid 236 is a Cys.

### HLA-C

[0194] In some cases, a multiple disulfide-linked TMMP of the present disclosure (e.g., a double disulfide-linked TMMP) comprises: a) a first polypeptide comprising: i) a MUC1 peptide of at least 4 amino acids in length (e.g., a MUC1 peptide of from 4 amino acids to about 25 amino acids in length) that is bound by a TCR when the peptide is complexed with MHC polypeptides); and ii) a first MHC polypeptide, where the first polypeptide comprises a peptide linker between the peptide and the first MHC polypeptide, where the peptide linker comprises a Cys residue, and where the first MHC polypeptide is a β2M polypeptide that comprises an amino acid substitution that introduces a Cys residue; and b) a second polypeptide comprising an HLA-C MHC Class I heavy chain comprising an amino acid sequence having at least 60%, at least 70%, at least 80%, at least 90%, at least 95%, at least 98%, at least 99%, or 100%, amino acid sequence identity to the following amino acid sequence: CSHSMRYFDTAVSRPGRGEPRFISVGYVDDTQFVRFDSDAASPRGEPRAPWVEQEGPEYWDRE TQNYKRQAQADRVSLRNLRGCYNQSEDGSHTLQRMYGCDLGPDGRLLRGYDQSAYDGKDYI ALNEDLRSWTAADTAAQITQRKLEAARAAEQLRAYLEGTCVEWLRRYLENGKETLQRAEPPKT HVTHHPLSDHEATLRCWALGFYPAEITLTWQRDGEDQTQDTELVETRPCGDGTFQKWAAVVV PSGQEQRYTCHMQHEGLQEPLTLSWEP (SEQ ID NO:163), where amino acid 84 is a Cys and amino acid 236 is a Cys; and c) at least one immunomodulatory polypeptide, where the first and/or the second polypeptide comprises the at least one immunomodulatory polypeptide. In some cases, the peptide linker comprises the amino acid sequence GCGGS (SEQ ID NO:139). In some cases, the peptide linker comprises the amino acid sequence GCGGS(GGGGS)n (SEQ ID NO: 140), where n is an integer from 1 to 10. In some cases, the β2M polypeptide comprises an R12C substitution. For example, the β2M polypeptide can comprises an amino acid sequence having at least 90%, at least 95%, at least 98%, at least 99%, or 100%, amino acid sequence identity to the following amino acid sequence: IQRTPKIQVYSCHPAENGKSNFLNCYVSGFHPSDIEVDLLKNGERIEKVEHSDLSFSKDWSFYLL YYTEFTPTEKDEYACRVNHVTLSQPKIVKWDRDM (SEQ ID NO:164), where amino acid 12 is a Cys. The at least one immunomodulatory polypeptide can be a cytokine, a 4-1BBL polypeptide, a B7-1 polypeptide; a B7-2 polypeptide, an ICOS-L polypeptide, an OX-40L polypeptide, a CD80 polypeptide, a CD86 polypeptide, a PD-L1 polypeptide, a FasL polypeptide, or a PD-L2 polypeptide. In some cases, the at least one immunomodulatory polypeptide is a reduced affinity variant, as described elsewhere herein. In some cases, the first or the second polypeptide comprises an Ig Fc polypeptide.

[0195] In some cases, a multiple disulfide-linked TMMP of the present disclosure (e.g., a double disulfide-linked TMMP) comprises an HLA-C Class I heavy chain polypeptide. In some cases, the HLA-C heavy chain polypeptide present in a multiple disulfide-linked TMMP of the present disclosure (e.g., a double disulfide-linked TMMP) comprises an amino acid sequence having at least 95%, at least 98%, or at least 99%, amino acid sequence identity to the HLA-C*0102, HLA-C*0303, HLA-C*0304, HLA-C*0401, HLA-C*0602, HLA-C*0701, HLA-C*0702, HLA-C*0801, or HLA-C*1502 amino acid sequence depicted in FIG. 9A, where the HLA-C heavy chain polypeptide comprises Y84C and A236C substitutions.

### HLA-C*01:02 (Y84C; A236C)

[0196] In some cases, the HLA-C heavy chain polypeptide present in a multiple disulfide-linked TMMP of the present disclosure (e.g., a double disulfide-linked TMMP) comprises an amino acid sequence having at least 95%, at least 98%, at least 99%, or 100%, amino acid sequence identity to the following HLA-C*01:02 (Y84C; A236C) amino acid sequence:

[0197] CSHSMKYFFTSVSRPGRGEPRFISVGYVDDTQFVRFDSDAASPRGEPRAPWVEQE GPEYWDRETQKYKRQAQTDRVSLRNLRGCYNQSEAGSHTLQWMCGCDLGPDGRLLRGYDQY AYDGKDYIALNEDLRSWTAADTAAQITQRKWEAAREAEQRRAYLEGTCVEWLRRYLENGKET LQRAEHPKTHVTHHPVSDHEATLRCWALGFYPAEITLTWQWDGEDQTQDTELVETRPCGDGTF QKWAAVMVPSGEEQRYTCHVQHEGLPEPLTLRWEP (SEQ ID NO:165), where amino acid 84 is a Cys and amino acid 236 is a Cys.

### HLA-C*0303 (Y84C; A236C)

[0198] In some cases, the HLA-C heavy chain polypeptide present in a multiple disulfide-linked TMMP of the present disclosure (e.g., a double disulfide-linked TMMP) comprises an amino acid sequence having at least 95%, at least 98%, at least 99%, or 100%, amino acid sequence identity to the following HLA-C*03:03 (Y84C; A236C) amino acid sequence:

[0199] GSHSMRYFYTAVSRPGRGEPHFIAVGYVDDTQFVRFDSDAASPRGEPRAPWVEQE GPEYWDRETQKYKRQAQTDRVSLRNLRGCYNQSEARSHIIQRMYGCDVGPDGRLLRGYDQYA YDGKDYIALNEDLRSWTAADTAAQITQRKWEAAREAEQLRAYLEGLCVEWLRRYLKNGKETL QRAEHPKTHVTHHPVSDHEATLRCWALGFYPAEITLTWQWDGEDQTQDTELVETRPCGDGTF QKWAAVVVPSGEEQRYTCHVQHEGLPEPLTLRWEP (SEQ ID NO:166), where amino acid 84 is a Cys and amino acid 236 is a Cys.

### HLA-C*0304 (Y84C; A236C)

[0200] In some cases, the HLA-C heavy chain polypeptide present in a multiple disulfide-linked TMMP of the present disclosure (e.g., a double disulfide-linked TMMP) comprises an amino acid sequence having at least 95%, at least 98%, at least 99%, or 100%, amino acid sequence identity to the following HLA-C*03:04 (Y84C; A236C) amino acid sequence:

[0201] GSHSMRYFYTAVSRPGRGEPHFIAVGYVDDTQFVRFDSDAASPRGEPRAPWVEQE GPEYWDRETQKYKRQAQTDRVSLRNLRGCYNQSEAGSHIIQRMYGCDVGPDGRLLRGYDQYA YDGKDYIALNEDLRSWTAADTAAQITQRKWEAAREAEQLRAYLEGLCVEWLRRYLKNGKETL QRAEHPKTHVTHHPVSDHEATLRCWALGFYPAEITLTWQWDGEDQTQDTELVETRPCGDGTF QKWAAVVVPSGEEQRYTCHVQHEGLPEPLTLRWEP (SEQ ID NO:167), where amino acid 84 is a Cys and amino acid 236 is a Cys.

### HLA-C*0401 (Y84C; A236C)

[0202] In some cases, the HLA-C heavy chain polypeptide present in a multiple disulfide-linked TMMP of the present disclosure (e.g., a double disulfide-linked TMMP) comprises an amino acid sequence having at least 95%, at least 98%, at least 99%, or 100%, amino acid sequence identity to the following HLA-C*04:01 (Y84C; A236C) amino acid sequence:

[0203] GSHSMRYFSTSVSWPGRGEPRFIAVGYVDDTQFVRFDSDAASPRGEPREPWVEQE GPEYWDRETQKYKRQAQADRVNLRKLRGCYNQSEDGSHTLQRMFGCDLGPDGRLLRGYNQF AYDGKDYIALNEDLRSWTAADTAAQITQRKWEAAREAEQRRAYLEGTCVEWLRRYLENGKET LQRAEHPKTHVTHHPVSDHEATLRCWALGFYPAEITLTWQWDGEDQTQDTELVETRPCGDGTF QKWAAVVVPSGEEQRYTCHVQHEGLPEPLTLRWKP (SEQ ID NO:168), where amino acid 84 is a Cys and amino acid 236 is a Cys.

### HLA-C*0602 (Y84C; A236C)

[0204] In some cases, the HLA-C heavy chain polypeptide present in a multiple disulfide-linked TMMP of the present disclosure (e.g., a double disulfide-linked TMMP) comprises an amino acid sequence having at least 95%, at least 98%, at least 99%, or 100%, amino acid sequence identity to the following HLA-C*06:02 (Y84C; A236C) amino acid sequence:

[0205] CSHSMRYFDTAVSRPGRGEPRFISVGYVDDTQFVRFDSDAASPRGEPRAPWVEQE GPEYWDRETQKYKRQAQADRVNLRKLRGCYNQSEDGSHTLQWMYGCDLGPDGRLLRGYDQS AYDGKDYIALNEDLRSWTAADTAAQITQRKWEAAREAEQWRAYLEGTCVEWLRRYLENGKE TLQRAEHPKTHVTHHPVSDHEATLRCWALGFYPAEITLTWQRDGEDQTQDTELVETRPCGDGT FQKWAAVVVPSGEEQRYTCHVQHEGLPEPLTLRWEP (SEQ ID NO:169), where amino acid 84 is a Cys and amino acid 236 is a Cys.

### HLA-C*0701 (Y84C; A236C)

[0206] In some cases, the HLA-C heavy chain polypeptide present in a multiple disulfide-linked TMMP of the present disclosure (e.g., a double disulfide-linked TMMP) comprises an amino acid sequence having at least 95%, at least 98%, at least 99%, or 100%, amino acid sequence identity to the following HLA-C*07:01 (Y84C; A236C) amino acid sequence:

[0207] CSHSMRYFDTAVSRPGRGEPRFISVGYVDDTQFVRFDSDAASPRGEPRAPWVEQE GPEYWDRETQNYKRQAQADRVSLRNLRGCYNQSEDGSHTLQRMYGCDLGPDGRLLRGYDQS AYDGKDYIALNEDLRSWTAADTAAQITQRKLEAARAAEQLRAYLEGTCVEWLRRYLENGKET LQRAEPPKTHVTHHPLSDHEATLRCWALGFYPAEITLTWQRDGEDQTQDTELVETRPCGDGTF QKWAAVVVPSGQEQRYTCHMQHEGLQEPLTLSWEP (SEQ ID NO:170), where amino acid 84 is a Cys and amino acid 236 is a Cys.

### HLA-C*0702 (Y84C; A236C)

[0208] In some cases, the HLA-C heavy chain polypeptide present in a multiple disulfide-linked TMMP of the present disclosure (e.g., a double disulfide-linked TMMP) comprises an amino acid sequence having at least 95%, at least 98%, at least 99%, or 100%, amino acid sequence identity to the following HLA-C*07:02 (Y84C; A236C) amino acid sequence:

[0209] CSHSMRYFDTAVSRPGRGEPRFISVGYVDDTQFVRFDSDAASPRGEPRAPWVEQE GPEYWDRETQKYKRQAQADRVSLRNLRGCYNQSEDGSHTLQRMSGCDLGPDGRLLRGYDQS AYDGKDYIALNEDLRSWTAADTAAQITQRKLEAARAAEQLRAYLEGTCVEWLRRYLENGKET LQRAEPPKTHVTHHPLSDHEATLRCWALGFYPAEITLTWQRDGEDQTQDTELVETRPCGDGTF QKWAAVVVPSGQEQRYTCHMQHEGLQEPLTLSWEP (SEQ ID NO:171), where amino acid 84 is a Cys and amino acid 236 is a Cys.

### HLA-C*0801 (Y84C; A236C)

[0210] In some cases, the HLA-C heavy chain polypeptide present in a multiple disulfide-linked TMMP of the present disclosure (e.g., a double disulfide-linked TMMP) comprises an amino acid sequence having at least 95%, at least 98%, at least 99%, or 100%, amino acid sequence identity to the following HLA-C*08:01 (Y84C; A236C) amino acid sequence:

[0211] CSHSMRYFYTAVSRPGRGEPRFIAVGYVDDTQFVQFDSDAASPRGEPRAPWVEQE GPEYWDRETQKYKRQAQTDRVSLRNLRGCYNQSEAGSHTLQRMYGCDLGPDGRLLRGYNQF AYDGKDYIALNEDLRSWTAADTAAQITQRKWEAARTAEQLRAYLEGTCVEWLRRYLENGKKT LQRAEHPKTHVTHHPVSDHEATLRCWALGFYPAEITLTWQRDGEDQTQDTELVETRPCGDGTF QKWAAVVVPSGEEQRYTCHVQHEGLPEPLTLRWGP (SEQ ID NO:172), where amino acid 84 is a Cys and amino acid 236 is a Cys.

### HLA-C*1502 (Y84C; A236C)

[0212] In some cases, the HLA-C heavy chain polypeptide present in a multiple disulfide-linked TMMP of the present disclosure (e.g., a double disulfide-linked TMMP) comprises an amino acid sequence having at least 95%, at least 98%, at least 99%, or 100%, amino acid sequence identity to the following HLA-C*15:02 (Y84C; A236C) amino acid sequence:

[0213] CSHSMRYFYTAVSRPGRGEPHFIAVGYVDDTQFVRFDSDAASPRGEPRAPWVEQE GPEYWDRETQNYKRQAQTDRVNLRKLRGCYNQSEAGSHIIQRMYGCDLGPDGRLLRGHDQLA YDGKDYIALNEDLRSWTAADTAAQITQRKWEAAREAEQLRAYLEGTCVEWLRRYLENGKETL QRAEHPKTHVTHHPVSDHEATLRCWALGFYPAEITLTWQRDGEDQTQDTELVETRPCGDGTFQ KWAAVVVPSGEEQRYTCHVQHEGLPEPLTLRWEP (SEQ ID NO:173), where amino acid 84 is a Cys and amino acid 236 is a Cys.

### Scaffold Polypeptides

[0214] A TMMP can comprise an Fc polypeptide, or can comprise another suitable scaffold polypeptide.

[0215] Suitable scaffold polypeptides include antibody-based scaffold polypeptides and non-antibody-based scaffolds. Non-antibody-based scaffolds include, e.g., albumin, an XTEN (extended recombinant) polypeptide, transferrin, an Fc receptor polypeptide, an elastin-like polypeptide (see, e.g., Hassouneh et al. (2012) Methods Enzymol. 502:215; e.g., a polypeptide comprising a pentapeptide repeat unit of (Val-Pro-Gly-X-Gly; SEQ ID NO:59), where X is any amino acid other than proline), an albumin-binding polypeptide, a silk-like polypeptide (see, e.g., Valluzzi et al. (2002) Philos Trans R Soc Lond B Biol Sci. 357:165), a silk-elastin-like polypeptide (SELP; see, e.g., Megeed et al. (2002) Adv Drug Deliv Rev. 54:1075), and the like. Suitable XTEN polypeptides include, e.g., those disclosed in WO 2009/023270, WO 2010/091122, WO 2007/103515, US 2010/0189682, and US 2009/0092582; see also Schellenberger et al. (2009) Nat Biotechnol. 27:1186). Suitable albumin polypeptides include, e.g., human serum albumin.

[0216] Suitable scaffold polypeptides will in some cases be a half-life extending polypeptides. Thus, in some cases, a suitable scaffold polypeptide increases the in vivo half-life (e.g., the serum half-life) of the TMMP, compared to a control TMMP lacking the scaffold polypeptide. For example, in some cases, a scaffold polypeptide increases the in vivo half-life (e.g., the serum half-life) of the TMMP, compared to a control TMMP lacking the scaffold polypeptide, by at least about 10%, at least about 15%, at least about 20%, at least about 25%, at least about 50%, at least about 2-fold, at least about 2.5-fold, at least about 5-fold, at least about 10-fold, at least about 25-fold, at least about 50-fold, at least about 100-fold, or more than 100-fold. As an example, in some cases, an Fc polypeptide increases the in vivo half-life (e.g., the serum half-life) of the TMMP, compared to a control TMMP lacking the Fc polypeptide, by at least about 10%, at least about 15%, at least about 20%, at least about 25%, at least about 50%, at least about 2-fold, at least about 2.5-fold, at least about 5-fold, at least about 10-fold, at least about 25-fold, at least about 50-fold, at least about 100-fold, or more than 100-fold.

### Fc Polypeptides

[0217] In some cases, the first and/or the second polypeptide chain of a TMMP of the present disclosure comprises an Fc polypeptide. The Fc polypeptide of a TMMP of the present disclosure can be a human IgG1 Fc, a human IgG2 Fc, a human IgG3 Fc, a human IgG4 Fc, etc. In some cases, the Fc polypeptide comprises an amino acid sequence having at least about 70%, at least about 75%, at least about 80%, at least about 85%, at least about 90%, at least about 95%, at least about 98%, at least about 99%, or 100%, amino acid sequence identity to an amino acid sequence of an Fc region depicted in FIG. 3A-3G. In some cases, the Fc region comprises an amino acid sequence having at least about 70%, at least about 75%, at least about 80%, at least about 85%, at least about 90%, at least about 95%, at least about 98%, at least about 99%, or 100%, amino acid sequence identity to the human IgG1 Fc polypeptide depicted in FIG. 3A. In some cases, the Fc region comprises an amino acid sequence having at least about 70%, at least about 75%, at least about 80%, at least about 85%, at least about 90%, at least about 95%, at least about 98%, at least about 99%, or 100%, amino acid sequence identity to the human IgG1 Fc polypeptide depicted in FIG. 3A; and comprises a substitution of N77; e.g., the Fc polypeptide comprises an N77A substitution. In some cases, the Fc polypeptide comprises an amino acid sequence having at least about 70%, at least about 75%, at least about 80%, at least about 85%, at least about 90%, at least about 95%, at least about 98%, at least about 99%, or 100%, amino acid sequence identity to the human IgG2 Fc polypeptide depicted in FIG. 3A; e.g., the Fc polypeptide comprises an amino acid sequence having at least about 70%, at least about 75%, at least about 80%, at least about 85%, at least about 90%, at least about 95%, at least about 98%, at least about 99%, or 100%, amino acid sequence identity to amino acids 99-325 of the human IgG2 Fc polypeptide depicted in FIG. 3A. In some cases, the Fc polypeptide comprises an amino acid sequence having at least about 70%, at least about 75%, at least about 80%, at least about 85%, at least about 90%, at least about 95%, at least about 98%, at least about 99%, or 100%, amino acid sequence identity to the human IgG3 Fc polypeptide depicted in FIG. 3A; e.g., the Fc polypeptide comprises an amino acid sequence having at least about 70%, at least about 75%, at least about 80%, at least about 85%, at least about 90%, at least about 95%, at least about 98%, at least about 99%, or 100%, amino acid sequence identity to amino acids 19-246 of the human IgG3 Fc polypeptide depicted in FIG. 3A. In some cases, the Fc polypeptide comprises an amino acid sequence having at least about 70%, at least about 75%, at least about 80%, at least about 85%, at least about 90%, at least about 95%, at least about 98%, at least about 99%, or 100%, amino acid sequence identity to the human IgM Fc polypeptide depicted in FIG. 3B; e.g., the Fc polypeptide comprises an amino acid sequence having at least about 70%, at least about 75%, at least about 80%, at least about 85%, at least about 90%, at least about 95%, at least about 98%, at least about 99%, or 100%, amino acid sequence identity to amino acids 1-276 to the human IgM Fc polypeptide depicted in FIG. 3B. In some cases, the Fc polypeptide comprises an amino acid sequence having at least about 70%, at least about 75%, at least about 80%, at least about 85%, at least about 90%, at least about 95%, at least about 98%, at least about 99%, or 100%, amino acid sequence identity to the human IgA Fc polypeptide depicted in FIG. 3C; e.g., the Fc polypeptide comprises an amino acid sequence having at least about 70%, at least about 75%, at least about 80%, at least about 85%, at least about 90%, at least about 95%, at least about 98%, at least about 99%, or 100%, amino acid sequence identity to amino acids 1-234 to the human IgA Fc polypeptide depicted in FIG. 3C.

[0218] In some cases, the Fc polypeptide comprises an amino acid sequence having at least about 70%, at least about 75%, at least about 80%, at least about 85%, at least about 90%, at least about 95%, at least about 98%, at least about 99%, or 100%, amino acid sequence identity to the human IgG4 Fc polypeptide depicted in FIG. 3C. In some cases, the Fc polypeptide comprises an amino acid sequence having at least about 70%, at least about 75%, at least about 80%, at least about 85%, at least about 90%, at least about 95%, at least about 98%, at least about 99%, or 100%, amino acid sequence identity to amino acids 100 to 327 of the human IgG4 Fc polypeptide depicted in FIG. 3C.

[0219] In some cases, the IgG4 Fc polypeptide comprises the following amino acid sequence:

(SEQ ID NO: 175)
PPCPSCPAPEFLGGPSVFLFPPKPKDTLMISRTPEVTCVVVDVSQEDPEV
QFNWYVDGVEVHNAKTKPREEQFNSTYRVVSVLTVLHQDWLNGKEYKCKV
SNKGLPSSIEKTISKAKGQPREPQVYTLPPSQEEMTKNQVSLTCLVKGFY
PSDIAVEWESNGQPENNYKTTPPVLDSDGSFFLYSRLTVDKSRWQEGNVF
SCSVMHEALHNHYTQKSLSLSPG.

[0220] In some cases, the Fc polypeptide present in a TMMP comprises the amino acid sequence depicted in FIG. 3A (human IgG1 Fc). In some cases, the Fc polypeptide present in a TMMP comprises the amino acid sequence depicted in FIG. 3A (human IgG1 Fc), except for a substitution of N297 (N77 of the amino acid sequence depicted in FIG. 3A) with an amino acid other than asparagine. In some cases, the Fc polypeptide present in a TMMP comprises the amino acid sequence depicted in FIG. 3C (human IgG1 Fc comprising an N297A substitution, which is N77 of the amino acid sequence depicted in FIG. 3A). In some cases, the Fc polypeptide present in a TMMP comprises the amino acid sequence depicted in FIG. 3A (human IgG1 Fc), except for a substitution of L234 (L14 of the amino acid sequence depicted in FIG. 3A) with an amino acid other than leucine. In some cases, the Fc polypeptide present in a TMMP comprises the amino acid sequence depicted in FIG. 3A (human IgG1 Fc), except for a substitution of L235 (L15 of the amino acid sequence depicted in FIG. 3A) with an amino acid other than leucine.

[0221] In some cases, the Fc polypeptide present in a TMMP comprises the amino acid sequence depicted in FIG. 3E. In some cases, the Fc polypeptide present in a TMMP comprises the amino acid sequence depicted in FIG. 3F. In some cases, the Fc polypeptide present in a TMMP comprises the amino acid sequence depicted in FIG. 5G (human IgG1 Fc comprising an L234A substitution and an L235A substitution, corresponding to positions 14 and 15 of the amino acid sequence depicted in FIG. 3G). In some cases, the Fc polypeptide present in a TMMP comprises the amino acid sequence depicted in FIG. 3A (human IgG1 Fc), except for a substitution of P331 (P111 of the amino acid sequence depicted in FIG. 3A) with an amino acid other than proline; in some cases, the substitution is a P331S substitution. In some cases, the Fc polypeptide present in a TMMP comprises the amino acid sequence depicted in FIG. 3A (human IgG1 Fc), except for substitutions at L234 and L235 (L14 and L15 of the amino acid sequence depicted in FIG. 3A) with amino acids other than leucine. In some cases, the Fc polypeptide present in a TMMP comprises the amino acid sequence depicted in FIG. 3A (human IgG1 Fc), except for substitutions at L234 and L235 (L14 and L15 of the amino acid sequence depicted in FIG. 3A) with amino acids other than leucine, and a substitution of P331 (P111 of the amino acid sequence depicted in FIG. 3A) with an amino acid other than proline. In some cases, the Fc polypeptide present in a TMMP comprises the amino acid sequence depicted in FIG. 3E (human IgG1 Fc comprising L234F, L235E, and P331S substitutions (corresponding to amino acid positions 14, 15, and 111 of the amino acid sequence depicted in FIG. 3E). In some cases, the Fc polypeptide present in a TMMP is an IgG1 Fc polypeptide that comprises L234A and L235A substitutions (substitutions of L14 and L15 of the amino acid sequence depicted in FIG. 3A with Ala), as depicted in FIG. 3G.

### Tumor-Targeting Polypeptide

[0222] A TMMP of the present disclosure can include a tumor-targeting polypeptide (TTP). For example, a TTP can be specific for a MUC1 polypeptide present on a cancer cell. In some cases, the TTP is specific for the cleaved form of MUC1; see, e.g., Fessler et al. (2009) Breast Cancer Res. Treat. 118:113. A TTP can be specific for a cancer-associated antigen other than MUC1. In some cases, the TTP is an antibody. In some cases, the TTP is a single-chain T-cell receptor (scTCR).

[0223] In some cases, the TTP is an antibody. In some cases, the TTP is a single-chain antibody. In some cases, the TTP is a scFv. In some cases, the TTP is a nanobody (also referred to as a single domain antibody (sdAb)). In some cases, the TTP is a heavy chain nanobody. In some cases, the TTP is a light chain nanobody. In some cases, the TTP is an antibody specific for a glycosylated MUC1 peptide; see, e.g., Naito et al. (2017) ACS Omega 2:7493; and U.S. Pat. No. 10,017,580. In some cases, the TTP is an antibody specific for a cancer-associated antigen other than MUC1.

### Anti-MUC1 Antibodies

[0224] As one non-limiting example, a TTP can be a single-chain Fv specific for MUC1. See, e.g., Singh et al. (2007) Mol. Cancer Ther. 6:562; Thie et al. (2011) PLoSOne 6:e15921; Imai et al. (2004) Leukemia 18:676; Posey et al. (2016) Immunity 44:1444; EP3130607; EP3164418; WO 2002/044217; and US 2018/0112007. In some cases, a TTP is a scFv specific for the MUC1 peptide VTSAPDTRPAPGSTAPPAHG (SEQ ID NO:319). In some cases, a TTP is a scFv specific for the MUC1 peptide SNIKFRPGSVVVQLTLAFREGTINVHDVETQFNQYKTEAASRY (SEQ ID NO:320). In some cases, a TTP is a scFv specific for the MUC1 peptide SVVVQLTLAFREGTINVHDVETQFNQYKTEAASRY (SEQ ID NO:321). In some cases, a TTP is a scFv specific for the MUC1 peptide LAFREGTINVHDVETQFNQY (SEQ ID NO:322). In some cases, a TTP is a scFv specific for the MUC1 peptide SNIKFRPGSVVVQLTLAAFREGTIN (SEQ ID NO:323).

[0225] As an example, an anti-MUC1 antibody can comprise: a VH CDR1 having the amino acid sequence RYGMS (SEQ ID NO:324); a VH CDR2 having the amino acid sequence TISGGGTYIYYPDSVKG (SEQ ID NO:325); a VH CDR3 having the amino acid sequence DNYGRNYDYGMDY (SEQ ID NO:326); a VL CDR1 having the amino acid sequence SATSSVSYIH (SEQ ID NO:327); a VL CDR2 having the amino acid sequence STSNLAS (SEQ ID NO:328); and a VL CDR3 having the amino acid sequence QQRSSSPFT (SEQ ID NO:329). See, e.g., US 2018/0112007.

[0226] As another example, an anti-MUC1 antibody can comprise a VH CDR1 having the amino acid sequence GYAMS (SEQ ID NO:330); a VH CDR2 having the amino acid sequence TISSGGTYIYYPDSVKG (SEQ ID NO:331); a VH CDR3 having the amino acid sequence LGGDNYYEYFDV (SEQ ID NO:332); a VL CDR1 having the amino acid sequence RASKSVSTSGYSYMH (SEQ ID NO:333); a VL CDR2 having the amino acid sequence LASNLES (SEQ ID NO:334); and a VL CDR3 having the amino acid sequence QHSRELPFT (SEQ ID NO:335). See, e.g., US 2018/0112007.

[0227] As another example, an anti-MUC1 antibody can comprise a VH CDR1 having the amino acid sequence DYAMN (SEQ ID NO:336); a VH CDR2 having the amino acid sequence VISTFSGNINFNQKFKG (SEQ ID NO:337); a VH CDR3 having the amino acid sequence SDYYGPYFDY (SEQ ID NO:338); a VL CDR1 having the amino acid sequence RSSQTIVHSNGNTYLE (SEQ ID NO:339); a VL CDR2 having the amino acid sequence KVSNRFS (SEQ ID NO:340); and a VL CDR3 having the amino acid sequence (FQGSHVPFT (SEQ ID NO:341). See, e.g., US 2018/0112007.

[0228] As another example, an anti-MUC1 antibody can comprise a VH CDR1 having the amino acid sequence GYAMS (SEQ ID NO:342); a VH CDR2 having the amino acid sequence TISSGGTYIYYPDSVKG (SEQ ID NO:343); a VH CDR3 having the amino acid sequence LGGDNYYEY (SEQ ID NO:344); a VL CDR1 having the amino acid sequence TASKSVSTSGYSYMH (SEQ ID NO:345); a VL CDR2 having the amino acid sequence LVSNLES (SEQ ID NO:346); and a VL CDR3 having the amino acid sequence QHIRELTRSE (SEQ ID NO:347). See, e.g., US 2018/0112007.

### Targets

[0229] As noted above, in some cases, a TTP present in a TMMP of the present disclosure can be specific for MUC1, or a cancer-associated antigen (“CAA”) other than MUC1. In some cases, the target of a TTP is a peptide/HLA (pHLA) complex on the surface of a cancer cell, where the peptide can be a cancer-associated peptide (e.g., a peptide fragment of a cancer-associated antigen).

### CAAs

[0230] CAAs that can be targeted with a tumor-targeting polypeptide present in a TMPP of the present disclosure include, e.g., NY-ESO (New York Esophageal Squamous Cell Carcinoma 1), MART-1 (melanoma antigen recognized by T cells 1, also known as Melan-A), HPV (human papilloma virus) E6, BCMA (B-cell maturation antigen), CD123, CD133, CD171, CD19, CD20, CD22, CD30, CD33, CEA (carcinoembryonic antigen), EGFR (epidermal growth factor receptor), EGFRvIII (epidermal growth factor receptor variant III), EpCAM (epithelial cell adhesion molecule), EphA2 (ephrin type-A receptor 2), disialoganglioside GD2, GPC3 (glypican-3), HER2, IL13Ralpha2 (Interleukin 13 receptor subunit alpha-2), LeY (a difucosylated type 2 blood group-related antigen), MAGE-A3 (melanoma-associated antigen 3), melanoma glycoprotein, mesothelin, myelin, NKG2D (Natural Killer Group 2D) ligands, PSMA (prostate specific membrane antigen), and ROR1 (type I receptor tyrosine kinase-like orphan receptor).

[0231] CAAs that can be targeted with a TTP present in a TMPP of the present disclosure include, but are not limited to, 17-1A-antigen, alpha-fetoprotein (AFP), alpha-actinin-4, A3, antigen specific for A33 antibody, ART-4, B7, Ba 733, BAGE, bcl-2, bcl-6, BCMA, BrE3-antigen, CA125, CAMEL, CAP-1, carbonic anhydrase IX (CAIX), CASP-8/m, CCL19, CCL21, CD1, CD1a, CD2, CD3, CD4, CD5, CD8, CD11A, CD14, CD15, CD16, CD18, CD19, CD20, CD21, CD22, CD23, CD25, CD29, CD30, CD32b, CD33, CD37, CD38, CD40, CD40L, CD44, CD45, CD46, CD52, CD54, CD55, CD59, CD64, CD66a-e, CD67, CD70, CD70L, CD74, CD79a, CD79b, CD80, CD83, CD95, CD123, CD126, CD132, CD133, CD138, CD147, CD154, CD171, CDC27, CDK-4/m, CDKN2A, CEA, CEACAM5, CEACAM6, complement factors (such as C3, C3a, C3b, C5a and C5), colon-specific antigen-p (CSAp), c-Met, CTLA-4, CXCR4, CXCR7, CXCL12, DAM, Dickkopf-related protein (DKK), ED-B fibronectin, epidermal growth factor receptor (EGFR), EGFRvIII, EGP-1 (TROP-2), EGP-2, ELF2-M, Ep-CAM, EphA2, EphA3, fibroblast activation protein (FAP), fibroblast growth factor (FGF), Flt-1, Flt-3, folate binding protein, folate receptor, G250 antigen, gangliosides (such as GC2, GD3 and GM2), GAGE, GD2, gp100, GPC3, GRO-13, HLA-DR, HM1.24, human chorionic gonadotropin (HCG) and its subunits, HER2, HER3, HMGB-1, hypoxia inducible factor (HIF-1), HIF-1a, HSP70-2M, HST-2, Ia, IFN-gamma, IFN-alpha, IFN-beta, IFN-X, IL-4R, IL-6R, IL-13R, IL13Ralpha2, IL-15R, IL-17R, IL-18R, IL-2, IL-6, IL-8, IL-12, IL-15, IL-17, IL-18, IL-23, IL-25, ILGF, ILGF-1R, insulin-like growth factor-1 (IGF-1), IGF-1R, integrin αVβ3, integrin α5β1, KC4-antigen, killer-cell immunoglobulin-like receptor (KIR), Kras, KS-1-antigen, KS1-4, LDR/FUT, Le^{gamma}, macrophage migration inhibitory factor (MIF), MAGE, MAGE-3, MART-1, MART-2, mCRP, MCP-1, melanoma glycoprotein, mesothelin, MIP-1A, MIP-1B, MIF, mucins (such as MUC1, MUC2, MUC3, MUC4, MUC5ac, MUC13, MUC16, MUM-1/2 and MUM-3), NCA66, NCA95, NCA90, NY-ESO-1, PAM4 antigen, pancreatic cancer mucin, PD-1, PD-L1, PD-1 receptor, placental growth factor, p53, PLAGL2, prostatic acid phosphatase, PSA, PRAME, PSMA, P1GF, RSS, RANTES, SAGE, ituximabrv ituximabrvivin-2B, T101, TAC, TAG-72, tenascin, Thomson-Friedenreich antigens, Tn antigen, TNF-alpha, tumor necrosis antigens, TRAG-3, TRAIL receptors, vascular endothelial growth factor (VEGF), VEGF receptor (VEGFR) and WT-1.

[0232] In some cases, the CAA is an antigen associated with a hematological cancer. Examples of such antigens include, but are not limited to, BCMA, C5, CD19, CD20, CD22, CD25, CD30, CD33, CD38, CD40, CD45, CD52, CD56, CD66, CD74, CD79a, CD79b, CD80, CD138, CTLA-4, CXCR4, DKK, EphA3, GM2, HLA-DR beta, integrin αVβ3, IGF-R1, IL6, KIR, PD-1, PD-L1, TRAILR1, TRAILR2, transferrin receptor, and VEGF. In some cases, the CAA is an antigen expressed by malignant B cells, such as CD19, CD20, CD22, CD25, CD38, CD40, CD45, CD74, CD80, CTLA-4, IGF-R1, IL6, PD-1, TRAILR2, or VEGF.

[0233] In some cases, the CAA is an antigen associated with a solid tumor. Examples of such antigens include, but are not limited to, CAIX, cadherins, CEA, c-MET, CTLA-4, EGFR family members, EpCAM, EphA3, FAP, folate-binding protein, FR-alpha, gangliosides (such as GC2, GD3 and GM2), HER2, HER3, IGF-1R, integrin αVβ3, integrin α5β1, Le^{gamma} Liv1, mesothelin, mucins, NaPi2b, PD-1, PD-L1, PD-1 receptor, pgA33, PSMA, RANKL, ROR1, TAG-72, tenascin, TRAILR1, TRAILR2, VEGF, VEGFR, and others listed above.

### Peptide/HLA Complexes

[0234] In some cases, the target of a TTP is a peptide/HLA (pHLA) complex on the surface of a cancer cell, where the peptide can be a cancer-associated peptide (e.g., a peptide fragment of a cancer-associated antigen). Cancer-associated peptides are known in the art. In some cases, a cancer-associated peptide is bound to a HLA complex comprising an HLA-A*0201 heavy chain and a β2M polypeptide.

[0235] In some cases, the peptide epitope present in the pHLA on the surface of a cancer cell is bound to an HLA complex comprising an HLA heavy chain such as HLA-A*0101, A*0201, A*0301, A*1101, A*2301, A*2402, A*2407, A*3303, and/or A*3401. In some cases, the peptide epitope present in the pHLA on the surface of a cancer cell is bound to an HLA complex comprising an HLA heavy chain such as HLA-B*0702, B*0801, B*1502, B*3802, B*4001, B*4601, and/or B*5301. In some cases, the peptide epitope present in the pHLA on the surface of a cancer cell is bound to an HLA complex comprising an HLA heavy chain such as C*0102, C*0303, C*0304, C*0401, C*0602, C*0701, C*702, C*0801, and/or C*1502.

[0236] In some cases, a cancer-associated peptide is a peptide of at least 4 amino acids in length, e.g., from 4 amino acids to about 25 amino acids in length (e.g., 4 amino acids (aa), 5 aa, 6 aa, 7 aa, 8 aa, 9 aa, 10 aa, 11 aa, 12 aa, 13 aa, 14 aa, 15 aa, 16 aa, 17 aa, 18 aa, 19 aa, 20 aa, 21 aa, 22 aa, 23 aa, 24 aa, or 25 aa, including within a range of from 4 to 20 amino acids, from 6 to 18 amino acids, from 8 to 15 amino acids, from 8 to 12 amino acids, from 5 to 10 amino acids, from 10 to 20 amino acids, and from 15 to 25 amino acids in length) of any one of the following cancer-associated antigens: a MUC1 polypeptide, an LMP2 polypeptide, an epidermal growth factor receptor (EGFR) vIII polypeptide, a HER-2/neu polypeptide, a melanoma antigen family A, 3 (MAGE A3) polypeptide, a p53 polypeptide, a mutant p53 polypeptide, an NY-ESO-1 polypeptide, a folate hydrolase (prostate-specific membrane antigen; PSMA) polypeptide, a carcinoembryonic antigen (CEA) polypeptide, a melanoma antigen recognized by T-cells (melanA/MART1) polypeptide, a Ras polypeptide, a gp100 polypeptide, a proteinase3 (PR1) polypeptide, a bcr-abl polypeptide, a tyrosinase polypepti ituximabrvivin polypeptide, a prostate specific antigen (PSA) polypeptide, an hTERT polypeptide, a sarcoma translocation breakpoints polypeptide, a synovial sarcoma X (SSX) breakpoint polypeptide, an EphA2 polypeptide, an acid phosphatase, prostate (PAP) polypeptide, a melanoma inhibitor of apoptosis (ML-IAP) polypeptide, an epithelial cell adhesion molecule (EpCAM) polypeptide, an ERG (TMPRSS2 ETS fusion) polypeptide, a NA17 polypeptide, a paired-box-3 (PAX3) polypeptide, an anaplastic lymphoma kinase (ALK) polypeptide, an androgen receptor polypeptide, a cyclin B1 polypeptide, an N-myc proto-oncogene (MYCN) polypeptide, a Ras homolog gene family member C (RhoC) polypeptide, a tyrosinase-related protein-2 (TRP-2) polypeptide, a mesothelin polypeptide, a prostate stem cell antigen (PSCA) polypeptide, a melanoma associated antigen-1 (MAGE A1) polypeptide, a cytochrome P450 1B1 (CYP1B1) polypeptide, a placenta-specific protein 1 (PLAC1) polypeptide, a BORIS polypeptide (also known as CCCTC-binding factor or CTCF), an ETV6-AML polypeptide, a breast cancer antigen NY-BR-1 polypeptide (also referred to as ankyrin repeat domain-containing protein 30A), a regulator of G-protein signaling (RGS5) polypeptide, a squamous cell carcinoma antigen recognized by T-cells (SART3) polypeptide, a carbonic anhydrase IX polypeptide, a paired box-5 (PAX5) polypeptide, an OY-TES1 (testis antigen; also known as acrosin binding protein) polypeptide, a sperm protein 17 polypeptide, a lymphocyte cell-specific protein-tyrosine kinase (LCK) polypeptide, a high molecular weight melanoma associated antigen (HMW-MAA), an A-kinase anchoring protein-4 (AKAP-4), a synovial sarcoma X breakpoint 2 (SSX2) polypeptide, an X antigen family member 1 (XAGE1) polypeptide, a B7 homolog 3 (B7H3; also known as CD276) polypeptide, a legumain polypeptide (LGMN1; also known as asparaginyl endopeptidase), a tyrosine kinase with Ig and EGF homology domains-2 (Tie-2; also known as angiopoietin-1 receptor) polypeptide, a P antigen family member 4 (PAGE4) polypeptide, a vascular endothelial growth factor receptor 2 (VEGF2) polypeptide, a MAD-CT-1 polypeptide, a fibroblast activation protein (FAP) polypeptide, a platelet derived growth factor receptor beta (PDGFβ) polypeptide, a MAD-CT-2 polypeptide, a Fos-related antigen-1 (FOSL) polypeptide; a human papilloma virus (HPV) antigen; an alpha-feto protein (AFP) antigen; and a Wilms tumor-1 (WT1) antigen.

[0237] For example, in some cases, a TTP present in a TMMP of the present disclosure binds to: a) a WT-1 peptide bound to an HLA complex comprising an HLA heavy chain (e.g., an HLA-A*0201 heavy chain or an HLA-A*2402 heavy chain) and a β2M polypeptide; b) an HPV peptide bound to an HLA complex comprising a class I HLA heavy chain and a β2M polypeptide; c) a mesothelin peptide bound to an HLA complex comprising a class I HLA heavy chain and a β2M polypeptide; d) a Her2 peptide bound to an HLA complex comprising a class I HLA heavy chain and a β2M polypeptide; or e) a BCMA peptide bound to an HLA complex comprising a class I HLA heavy chain and a β2M polypeptide.

[0238] In some cases, a cancer-associated peptide is a peptide of at least 4 amino acids in length, e.g., from 4 amino acids to about 25 amino acids in length (e.g., 4 amino acids (aa), 5 aa, 6 aa, 7 aa, 8 aa, 9 aa, 10 aa, 11 aa, 12 aa, 13 aa, 14 aa, 15 aa, 16 aa, 17 aa, 18 aa, 19 aa, 20 aa, 21 aa, 22 aa, 23 aa, 24 aa, or 25 aa, including within a range of from 4 to 20 amino acids, from 6 to 18 amino acids, from 8 to 15 amino acids, from 8 to 12 amino acids, from 5 to 10 amino acids, from 10 to 20 amino acids, and from 15 to 25 amino acids in length) of a mesothelin polypeptide having at least 90%, at least 95%, at least 98%, at least 99%, or 100%, amino acid sequence identity to the following mesothelin amino acid sequence:

[0239] LAGE TGQEAAPLDG VLANPPNISS LSPRQLLGFP CAEVSGLSTE RVRELAVALA QKNVKLSTEQ LRCLAHRLSE PPEDLDALPL DLLLFLNPDA FSGPQACTRF FSRITKANVD LLPRGAPERQ RLLPAALACW GVRGSLLSEA DVRALGGLAC DLPGRFVAES AEVLLPRLVS CPGPLDQDQQ EAARAALQGG GPPYGPPSTW SVSTMDALRG LLPVLGQPII RSIPQGIVAA WRQRSSRDPS WRQPERTILR PRFRREVEKT ACPSGKKARE IDESLIFYKK WELEACVDAA LLATQMDRVN AIPFTYEQLD VLKHKLDELY PQGYPESVIQ HLGYLFLKMS PEDIRKWNVT SLETLKALLE VNKGHEMSPQ VATLIDRFVK GRGQLDKDTL DTLTAFYPGY LCSLSPEELS SVPPSSIWAV RPQDLDTCDP RQLDVLYPKA RLAFQNMNGS EYFVKIQSFL GGAPTEDLKA LSQQNVSMDL ATFMKLRTDA VLPLTVAEVQ KLLGPHVEGL KAEERHRPVR DWILRQRQDD LDTLGLGLQG GIPNGYLVLD LSMQEALSGT PCLLGPGPVL TVLALLLAST LA (SEQ ID NO:176). For example, a mesothelin peptide present in a pHLA complex can be: i) KLLGPHVEGL (SEQ ID NO:526); ii) AFYPGYLCSL (SEQ ID NO:177), which can bind HLA-A*2402/02M; iii) VLPLTVAEV (SEQ ID NO:178); iv) ELAVALAQK (SEQ ID NO:179); v) ALQGGGPPY (SEQ ID NO:180); vi) FYPGYLCSL (SEQ ID NO:181); vii) LYPKARLAF (SEQ ID NO:182); viii) LLFLLFSLGWVGPSR (SEQ ID NO:183); ix) VNKGHEMSPQAPRRP (SEQ ID NO:184); x) FMKLRTDAVLPLTVA (SEQ ID NO:185); or xi) DAALLATQMD (SEQ ID NO:186).

[0240] In some cases, a cancer-associated peptide is a peptide of at least 4 amino acids in length, e.g., from 4 amino acids to about 25 amino acids in length (e.g., 4 amino acids (aa), 5 aa, 6 aa, 7 aa, 8 aa, 9 aa, 10 aa, 11 aa, 12 aa, 13 aa, 14 aa, 15 aa, 16 aa, 17 aa, 18 aa, 19 aa, 20 aa, 21 aa, 22 aa, 23 aa, 24 aa, or 25 aa, including within a range of from 4 to 20 amino acids, from 6 to 18 amino acids, from 8 to 15 amino acids, from 8 to 12 amino acids, from 5 to 10 amino acids, from 10 to 20 amino acids, and from 15 to 25 amino acids in length) of a Her2 polypeptide having at least 90%, at least 95%, at least 98%, at least 99%, or 100%, amino acid sequence identity to the following Her2 (receptor tyrosine-protein kinase erbB2) amino acid sequence:

(SEQ ID NO: 187)
MELAALCRWG LLLALLPPGA ASTQVCTGTD MKLRLPASPE
THLDMLRHLY QGCQVVQGNL ELTYLPTNAS LSFLQDIQEV
QGYVLIAHNQ VRQVPLQRLR IVRGTQLFED NYALAVLDNG
DPLNNTTPVT GASPGGLREL QLRSLTEILK GGVLIQRNPQ
LCYQDTILWK DIFHKNNQLA LTLIDTNRSR ACHPCSPMCK
GSRCWGESSE DCQSLTRTVC AGGCARCKGP LPTDCCHEQC
AAGCTGPKHS DCLACLHFNH SGICELHCPA LVTYNTDTFE
SMPNPEGRYT FGASCVTACP YNYLSTDVGS CTLVCPLHNQ
EVTAEDGTQR CEKCSKPCAR VCYGLGMEHL REVRAVTSAN
IQEFAGCKKI FGSLAFLPES FDGDPASNTA PLQPEQLQVF
ETLEEITGYL YISAWPDSLP DLSVFQNLQV IRGRILHNGA
YSLTLQGLGI SWLGLRSLRE LGSGLALIHH NTHLCFVHTV
PWDQLFRNPH QALLHTANRP EDECVGEGLA CHQLCARGHC
WGPGPTQCVN CSQFLRGQEC VEECRVLQGL PREYVNARHC
LPCHPECQPQ NGSVTCFGPE ADQCVACAHY KDPPFCVARC
PSGVKPDLSY MPIWKFPDEE GACQPCPINC THSCVDLDDK
GCPAEQRASP LTSIISAVVG ILLVVVLGVV FGILIKRRQQ
KIRKYTMRRL LQETELVEPL TPSGAMPNQA QMRILKETEL
RKVKVLGSGA FGTVYKGIWI PDGENVKIPV AIKVLRENTS
PKANKEILDE AYVMAGVGSP YVSRLLGICL TSTVQLVTQL
MPYGCLLDHV RENRGRLGSQ DLLNWCMQIA KGMSYLEDVR
LVHRDLAARN VLVKSPNHVK ITDFGLARLL DIDETEYHAD
GGKVPIKWMA LESILRRRFT HQSDVWSYGV TVWELMTFGA
KPYDGIPARE IPDLLEKGER LPQPPICTID VYMIMVKCWM
IDSECRPRFR ELVSEFSRMA RDPQRFVVIQ NEDLGPASPL
DSTFYRSLLE DDDMGDLVDA EEYLVPQQGF FCPDPAPGAG
GMVHHRHRSS STRNM.

[0241] In some cases, a cancer-associated peptide is a peptide of at least 4 amino acids in length, e.g., from 4 amino acids to about 25 amino acids in length (e.g., 4 amino acids (aa), 5 aa, 6 aa, 7 aa, 8 aa, 9 aa, 10 aa, 11 aa, 12 aa, 13 aa, 14 aa, 15 aa, 16 aa, 17 aa, 18 aa, 19 aa, 20 aa, 21 aa, 22 aa, 23 aa, 24 aa, or 25 aa, including within a range of from 4 to 20 amino acids, from 6 to 18 amino acids, from 8 to 15 amino acids, from 8 to 12 amino acids, from 5 to 10 amino acids, from 10 to 20 amino acids, and from 15 to 25 amino acids in length) of a BCMA polypeptide having at least 90%, at least 95%, at least 98%, at least 99%, or 100%, amino acid sequence identity to the following BCMA amino acid sequence:

(SEQ ID NO: 188)
[sequence omitted]

[0242] In some cases, a cancer-associated peptide is a peptide of at least 4 amino acids in length, e.g., from 4 amino acids to about 25 amino acids in length (e.g., 4 amino acids (aa), 5 aa, 6 aa, 7 aa, 8 aa, 9 aa, 10 aa, 11 aa, 12 aa, 13 aa, 14 aa, 15 aa, 16 aa, 17 aa, 18 aa, 19 aa, 20 aa, 21 aa, 22 aa, 23 aa, 24 aa, or 25 aa, including within a range of from 4 to 20 amino acids, from 6 to 18 amino acids, from 8 to 15 amino acids, from 8 to 12 amino acids, from 5 to 10 amino acids, from 10 to 20 amino acids, and from 15 to 25 amino acids in length) of a WT-1 polypeptide having at least 90%, at least 95%, at least 98%, at least 99%, or 100%, amino acid sequence identity to the following WT-1 amino acid sequence:

(SEQ ID NO: 189)
MDFLLLQDPA STCVPEPASQ HTLRSGPGCL QQPEQQGVRD
PGGIWAKLGA AEASAERLQG RRSRGASGSE PQQMGSDVRD
LNALLPAVPS LGGGGGCALP VSGAAQWAPV LDFAPPGASA
YGSLGGPAPP PAPPPPPPPP PHSFIKQEPS WGGAEPHEEQ
CLSAFTVHFS GQFTGTAGAC RYGPFGPPPP SQASSGQARM
FPNAPYLPSC LESQPAIRNQ GYSTVTFDGT PSYGHTPSHH
AAQFPNHSFK HEDPMGQQGS LGEQQYSVPP PVYGCHTPTD
SCTGSQALLL RTPYSSDNLY QMTSQLECMT WNQMNLGATL
KGHSTGYESD NHTTPILCGA QYRIHTHGVF RGIQDVRRVP
GVAPTLVRSA SETSEKRPFM CAYPGCNKRY FKLSHLQMHS
RKHTGEKPYQ CDFKDCERRF SRSDQLKRHQ RRHTGVKPFQ
CKTCQRKFSR SDHLKTHTRT HTGEKPFSCR WPSCQKKFAR
SDELVRHHNM HQRNMTKLQL AL.

[0243] Non-limiting examples of WT-1 peptides include RMFPNAPYL (SEQ ID NO:190), CMTWNQMN (SEQ ID NO:191), CYTWNQMNL (SEQ ID NO:192), CMTWNQMNLGATLKG (SEQ ID NO:193), WNQMNLGATLKGVAA (SEQ ID NO:194), CMTWNYMNLGATLKG (SEQ ID NO:195), WNYMNLGATLKGVAA (SEQ ID NO:196), MTWNQMNLGATLKGV (SEQ ID NO:197), TWNQMNLGATLKGVA (SEQ ID NO:198), CMTWNLMNLGATLKG (SEQ ID NO:199), MTWNLMNLGATLKGV (SEQ ID NO:200), TWNLMNLGATLKGVA (SEQ ID NO:201), WNLMNLGATLKGVAA (SEQ ID NO:202), MNLGATLK (SEQ ID NO:203), MTWNYMNLGATLKGV (SEQ ID NO:204), TWNYMNLGATLKGVA (SEQ ID NO:205), CMTWNQMNLGATLKGVA (SEQ ID NO:206), CMTWNLMNLGATLKGVA (SEQ ID NO:207), CMTWNYMNLGATLKGVA (SEQ ID NO:208), GYLRNPTAC (SEQ ID NO:209), GALRNPTAL (SEQ ID NO:210), YALRNPTAC (SEQ ID NO:211), GLLRNPTAC (SEQ ID NO:212), RYRPHPGAL (SEQ ID NO:213), YQRPHPGAL (SEQ ID NO:214), RLRPHPGAL (SEQ ID NO:215), RIRPHPGAL (SEQ ID NO:216), QFPNHSFKHEDPMGQ (SEQ ID NO:217), HSFKHEDPY (SEQ ID NO:218), QFPNHSFKHEDPM (SEQ ID NO:219), QFPNHSFKHEDPY (SEQ ID NO:220), KRPFMCAYPGCNK (SEQ ID NO:221), KRPFMCAYPGCYK (SEQ ID NO:222), FMCAYPGCY (SEQ ID NO:223), FMCAYPGCK (SEQ ID NO:224), KRPFMCAYPGCNKRY (SEQ ID NO:225), SEKRPFMCAYPGCNK (SEQ ID NO:226), KRPFMCAYPGCYKRY (SEQ ID NO:227), NLMNLGATL (SEQ ID NO:228), and NYMNLGATL (SEQ ID NO:229).In some cases, a cancer-associated peptide is a peptide of at least 4 amino acids in length, e.g., from 4 amino acids to about 25 amino acids in length (e.g., 4 amino acids (aa), 5 aa, 6 aa, 7 aa, 8 aa, 9 aa, 10 aa, 11 aa, 12 aa, 13 aa, 14 aa, 15 aa, 16 aa, 17 aa, 18 aa, 19 aa, 20 aa, 21 aa, 22 aa, 23 aa, 24 aa, or 25 aa, including within a range of from 4 to 20 amino acids, from 6 to 18 amino acids, from 8 to 15 amino acids, from 8 to 12 amino acids, from 5 to 10 amino acids, from 10 to 20 amino acids, and from 15 to 25 amino acids in length) of an HPV polypeptide having at least 90%, at least 95%, at least 98%, at least 99%, or 100%, amino acid sequence identity to a human papilloma virus (HPV) peptide. An HPV peptide can be a peptide of an HPV E6 polypeptide or an HPV E7 polypeptide. The HPV epitope can be an epitope of HPV of any of a variety of genotypes, including, e.g., HPV16, HPV18, HPV31, HPV33, HPV35, HPV39, HPV45, HPV51, HPV52, HPV56, HPV58, HPV59, HPV68, HPV73, or HPV82. Non-limiting examples of HPV peptides include: E6 18-26 (KLPQLCTEL; SEQ ID NO:230); E6 26-34 (LQTTIHDII; SEQ ID NO:231); E6 49-57 (VYDFAFRDL; SEQ ID NO:232); E6 52-60 (FAFRDLCIV; SEQ ID NO:233); E6 75-83 (KFYSKISEY; SEQ ID NO:234); E6 80-88 (ISEYRHYCY; SEQ ID NO:235); E7 7-15 (TLHEYMLDL; SEQ ID NO:236); E7 11-19 (YMLDLQPET; SEQ ID NO:237); E7 44-52 (QAEPDRAHY; SEQ ID NO:238); E7 49-57 (RAHYNIVTF (SEQ ID NO:239); E7 61-69 (CDSTLRLCV; SEQ ID NO:240); and E7 67-76 (LCVQSTHVDI; SEQ ID NO:241); E7 82-90 (LLMGTLGIV; SEQ ID NO:242); E7 86-93 (TLGIVCPI; SEQ ID NO:243); and E7 92-93 (LLMGTLGIVCPI; SEQ ID NO:244).

### Antibodies

[0244] As noted above, in some cases, a TTP present in a TMMP of the present disclosure is an antibody. In some cases, the TTP is an antibody that is specific for a CAA. In some cases, the TTP is an antibody specific for a peptide/HLA complex on the surface of a cancer cell, where the peptide can be a cancer-associated peptide (e.g., a peptide fragment of a cancer-associated antigen).

[0245] Non-limiting examples of CAA-targeted antibodies that can be included in a TMMP of the present disclosure include, but are not limited to, abituzumab (anti-CD51), LL1 (anti-CD74), LL2 or RFB4 (anti-CD22), veltuzumab (hA20; anti-CD20), rituximab (anti-CD20), obinutuzumab (GA101, anti-CD20), daratumumab (anti-CD38), lambrolizumab (anti-PD-1 receptor), nivolumab (anti-PD-1 receptor), ipilimumab (anti-CTLA-4), RS7 (anti-TROP-2), PAM4 or KC4 (both anti-mucin), MN-14 (anti-CEA), MN-15 or MN-3 (anti-CEACAM6), Mu-9 (anti-colon-specific antigen-p), Immu 31 (anti-alpha-fetoprotein), R1 (anti-IGF-1R), A19 (anti-CD19), TAG-72 (e.g., CC49), Tn, J591 or HuJ591 (anti-PSMA), AB-PG1-XG1-026 (anti-PSMA dimer), D2/B (anti-PSMA), G250 (anti-carbonic anhydrase IX), L243 (anti-HLA-DR) alemtuzumab (anti-CD52), oportuzumab (anti-EpCAM), bevacizumab (anti-VEGF), cetuximab (anti-EGFR), gemtuzumab (anti-CD33), ibritumomab (anti-CD20); panitumumab (anti-EGFR); tositumomab (anti-CD20); PAM4 (also known as clivatuzumab; anti-mucin), trastuzumab (anti-HER2), pertuzumab (anti-HER2), polatuzumab (anti-CD79b), ofatumumab (anti-CD20), and anetumab (anti-mesothelin).

[0246] In some cases, the tumor-targeting polypeptide is an antibody. In some cases, the tumor-targeting polypeptide is a single-chain antibody. In some cases, the tumor-targeting polypeptide is a scFv. In some cases, the tumor-targeting polypeptide is a nanobody (also referred to as a single domain antibody (sdAb)). In some cases, the tumor-targeting polypeptide is a heavy chain nanobody. In some cases, the tumor-targeting polypeptide is a light chain nanobody.

[0247] VH and VL amino acid sequences of various tumor antigen-binding antibodies are known in the art, as are the light chain and heavy chain CDRs of such antibodies. See, e.g., Ling et al. (2018) Frontiers Immunol. 9:469; WO 2005/012493; US 2019/0119375; US 2013/0066055. The following are non-limiting examples of tumor antigen-binding antibodies.

### Anti-Her2

[0248] In some cases, an anti-Her2 antibody comprises: a) a light chain comprising an amino acid sequence having at least 90%, at least 95%, at least 98%, at least 99%, or 100%, amino acid sequence identity to the following amino acid sequence:

[0249] DIQMTQSPSSLSASVGDRVTITCRASQDVNTAVAWYQQKPGKAPKLLIYSASFLYS GVPSRFSGSRSGTDFTLTISSLQPEDFATYYCQQHYTTPPTFGQGTKVEIKRTVAAPSVFIFPPSDE QLKSGTASVVCLLNNFYPREAKVQWKVDNALQSGNSQESVTEQDSKDSTYSLSSTLTLSKADY EKHKVYACEVTHQGLSSPVTKSFNRGEC (SEQ ID NO:248); and b) a heavy chain comprising an amino acid sequence having at least 90%, at least 95%, at least 98%, at least 99%, or 100%, amino acid sequence identity to the following amino acid sequence:

(SEQ ID NO: 249)
EVQLVESGGGLVQPGGSLRLSCAASGFNIKDTYIHWVRQAPGKGLEWVAR
IYPTNGYTRYADSVKGRFTISADTSKNTAYLQMNSLRAEDTAVYYCSRWG
GDGFYAMDYWGQGTLVTVSSASTKGPSVFPLAPSSKSTSGGTAALGCLVK
DYFPEPVTVSWNSGALTSGVHTFPAVLQSSGLYSLSSVVTVPSSSLGTQT
YICNVNHKPSNTKVDKKVEPKSCDKTHTCPPCPAPELLGGPSVFLFPPKP
KDTLMISRTPEVTCVVVDVSHEDPEVKFNWYVDGVEVHNAKTKPREEQYN
STYRVVSVLTVLHQDWLNGKEYKCKVSNKALPAPIEKTISKAKGQPREPQ
VYTLPPSREEMTKNQVSLTCLVKGFYPSDIAVEWESNGQPENNYKTTPPV
LDSDGSFFLYSKLTVDKSRWQQGNVFSCSVMHEALHNHYTQKSLSLSPG
K.

[0250] In some cases, an anti-Her2 antibody comprises a light chain variable region (VL) present in the light chain amino acid sequence provided above; and a heavy chain variable region (VH) present in the heavy chain amino acid sequence provided above. For example, an anti-Her2 antibody can comprise: a) a VL comprising an amino acid sequence having at least 90%, at least 95%, at least 98%, at least 99%, or 100%, amino acid sequence identity to the amino acid sequence: DIQMTQSPSSLSASVGDRVTITCRASQDVNTAVAWYQQKPGKAPKLLIYSASFLYSGVPSRFSGS RSGTDFTLTISSLQPEDFATYYCQQHYTTPPTFGQGTKVEIK (SEQ ID NO:250); and b) a VH comprising an amino acid sequence having at least 90%, at least 95%, at least 98%, at least 99%, or 100%, amino acid sequence identity to the amino acid sequence: EVQLVESGGGLVQPGGSLRLSCAASGFNIKDTYIHWVRQAPGKGLEWVARIYPTNGYTRYADS VKGRFTISADTSKNTAYLQMNSLRAEDTAVYYCSRWGGDGFYAMDYWGQGTLVTVSS (SEQ ID NO:251). In some cases, an anti-Her2 antibody comprises, in order from N-terminus to C-terminus: a) a VH comprising an amino acid sequence having at least 90%, at least 95%, at least 98%, at least 99%, or 100%, amino acid sequence identity to the amino acid sequence: EVQLVESGGGLVQPGGSLRLSCAASGFNIKDTYIHWVRQAPGKGLEWVARIYPTNGYTRYADS VKGRFTISADTSKNTAYLQMNSLRAEDTAVYYCSRWGGDGFYAMDYWGQGTLVTVSS (SEQ ID NO:252); b) a linker; and c) a VL comprising an amino acid sequence having at least 90%, at least 95%, at least 98%, at least 99%, or 100%, amino acid sequence identity to the amino acid sequence: DIQMTQSPSSLSASVGDRVTITCRASQDVNTAVAWYQQKPGKAPKLLIYSASFLYSGVPSRFSGS RSGTDFTLTISSLQPEDFATYYCQQHYTTPPTFGQGTKVEIK (SEQ ID NO:253). Suitable linkers are described elsewhere herein and include, e.g., (GGGGS)n (SEQ ID NO: 254), where n is an integer from 1 to 10 (e.g., 1, 2, 3, 4, 5, 6, 7, 8, 9, or 10).

[0251] In some cases, an anti-Her2 antibody comprises VL CDR1, VL CDR2, and VL CDR3 present in the light chain amino acid sequence provided above; and VH CDR1, CDR2, and CDR3 present in the heavy chain amino acid sequence provided above. In some cases, the V_{H} and V_{L} CDRs are as defined by Kabat (see, e.g., Table 2, above; and Kabat 1991). In some cases, the V_{H} and V_{L} CDRs are as defined by Chothia (see, e.g., Table 2, above; and Chothia 1987).

[0252] For example, an anti-Her2 antibody can comprise a VL CDR1 having the amino acid sequence RASQDVNTAVA (SEQ ID NO:255); a VL CDR2 having the amino acid sequence SASFLY (SEQ ID NO:256); a VL CDR3 having the amino acid sequence QQHYTTPP (SEQ ID NO:257); a VH CDR1 having the amino acid sequence GFNIKDTY (SEQ ID NO:258); a VH CDR2 having the amino acid sequence IYPTNGYT (SEQ ID NO:259); and a VH CDR3 having the amino acid sequence SRWGGDGFYAMDY (SEQ ID NO:260).

[0253] In some cases, an anti-Her2 antibody is a scFv antibody. For example, an anti-Her2 scFv can comprise an amino acid sequence having at least 90%, at least 95%, at least 98%, at least 99%, or 100%, amino acid sequence identity to the following amino acid sequence:

(SEQ ID NO: 261)
EVQLVESGGGLVQPGGSLRLSCAASGFNIKDTYIHWVRQAPGKGLEWVAR
IYPTNGYTRYADSVKGRFTISADTSKNTAYLQMNSLRAEDTAVYYCSRWG
GDGFYAMDYWGQGTLVTVSSGGGGSGGGGSGGGGSDIQMTQSPSSLSASV
GDRVTITCRASQDVNTAVAWYQQKPGKAPKLLIYSASFLYSGVPSRFSGS
RSGTDFTLTISSLQPEDFATYYCQQHYTTPPTFGQGTKVEIK.

[0254] As another example, in some cases, an anti-Her2 antibody comprises: a) a light chain variable region (VL) comprising an amino acid sequence having at least 90%, at least 95%, at least 98%, at least 99%, or 100%, amino acid sequence identity to the following amino acid sequence:

[0255] DIQMTQSPSSLSASVGDRVTITCKASQDVSIGVAWYQQKPGKAPKLLIYSASYRYT GVPSRFSGSGSGTDFTLTISSLQPEDFATYYCQQYYIYPYTFGQGTKVEIKRTVAAPSVFIFPPSDE QLKSGTASVVCLLNNFYPREAKVQWKVDNALQSGNSQESVTEQDSKDSTYSLSSTLTLSKADY EKHKVYACEVTHQGLSSPVTKSFNRGEC (SEQ ID NO:262); and b) a heavy chain variable region (VH) comprising an amino acid sequence having at least 90%, at least 95%, at least 98%, at least 99%, or 100%, amino acid sequence identity to the following amino acid sequence:

(SEQ ID NO: 263)
EVQLVESGGGLVQPGGSLRLSCAASGFTFTDYTMDWVRQAPGKGLEWVAD
VNPNSGGSIYNQRFKGRFTLSVDRSKNTLYLQMNSLRAEDTAVYYCARNL
GPSFYFDYWGQGTLVTVSSASTKGPSVFPLAPSSKSTSGGTAALGCLVKD
YFPEPVTVSWNSGALTSGVHTFPAVLQSSGLYSLSSVVTVPSSSLGTQTY
ICNVNHKPSNTKVDKKVEPKSCDKTHTCPPCPAPELLGGPSVFLFPPKPK
DTLMISRTPEVTCVVVDVSHEDPEVKFNWYVDGVEVHNAKTKPREEQYNS
TYRVVSVLTVLHQDWLNGKEYKCKVSNKALPAPIEKTISKAKGQPREPQV
YTLPPSREEMTKNQVSLTCLVKGFYPSDIAVEWESNGQPENNYKTTPPVL
DSDGSFFLYSKLTVDKSRWQQGNVFSCSVMHEALHNHYTQKSLSLSPG.

[0256] In some cases, an anti-Her2 antibody comprises a VL present in the light chain amino acid sequence provided above; and a VH present in the heavy chain amino acid sequence provided above. For example, an anti-Her2 antibody can comprise: a) a VL comprising an amino acid sequence having at least 90%, at least 95%, at least 98%, at least 99%, or 100%, amino acid sequence identity to the amino acid sequence: DIQMTQSPSSLSASVGDRVTITCKASQDVSIGVAWYQQKPGKAPKLLIYSASYRYTGVPSRFSGS GSGTDFTLTISSLQPEDFATYYCQQYYIYPYTFGQGTKVEIK (SEQ ID NO:264); and b) a VH comprising an amino acid sequence having at least 90%, at least 95%, at least 98%, at least 99%, or 100%, amino acid sequence identity to the amino acid sequence:

(SEQ ID NO: 265)
[sequence omitted]

[0257] In some cases, an anti-Her2 antibody comprises VL CDR1, VL CDR2, and VL CDR3 present in the light chain amino acid sequence provided above; and VH CDR1, CDR2, and CDR3 present in the heavy chain amino acid sequence provided above. In some cases, the V_{H} and V_{L} CDRs are as defined by Kabat (see, e.g., Table 2, above; and Kabat 1991). In some cases, the V_{H} and V_{L} CDRs are as defined by Chothia (see, e.g., Table 2, above; and Chothia 1987).

[0258] For example, an anti-HER2 antibody can comprise a VL CDR1 having the amino acid sequence KASQDVSIGVA (SEQ ID NO:266); a VL CDR2 having the amino acid sequence SASYRY (SEQ ID NO:267); a VL CDR3 having the amino acid sequence QQYYIYPY (SEQ ID NO:268); a VH CDR1 having the amino acid sequence GFTFTDYTMD (SEQ ID NO:269); a VH CDR2 having the amino acid sequence ADVNPNSGGSIYNQRFKG (SEQ ID NO:270); and a VH CDR3 having the amino acid sequence ARNLGPSFYFDY (SEQ ID NO:271).

[0259] In some cases, an anti-Her2 antibody is a scFv. For example, in some cases, an anti-Her2 scFv comprises an amino acid sequence having at least 90%, at least 95%, at least 98%, at least 99%, or 100%, amino acid sequence identity to the following amino acid sequence:

(SEQ ID NO: 272)
EVQLVESGGGLVQPGGSLRLSCAASGFNIKDTYIHWVRQAPGKGLEWVAR
IYPTNGYTRYADSVKGRFTISADTSKNTAYLQMNSLRAEDTAVYYCSRWG
GDGFYAMDYWGQGTLVTVSSGGGGSGGGGSGGGGSDIQMTQSPSSLSASV
GDRVTITCRASQDVNTAVAWYQQKPGKAPKLLIYSASFLYSGVPSRFSGS
RSGTDFTLTISSLQPEDFATYYCQQHYTTPPTFGQGTKVEIK.

### Anti-CD19

[0260] Anti-CD19 antibodies are known in the art; and the VH and VL, or the VH and VL CDRs, of any anti-CD19 antibody can be used in a TMMP of the present disclosure. See e.g., WO 2005/012493.

[0261] In some cases, an anti-CD19 antibody includes a VL CDR1 comprising the amino acid sequence KASQSVDYDGDSYLN (SEQ ID NO:273); a VL CDR2 comprising the amino acid sequence DASNLVS (SEQ ID NO:274); and a VL CDR3 comprising the amino acid sequence QQSTEDPWT (SEQ ID NO:275). In some cases, an anti-CD19 antibody includes a VH CDR1 comprising the amino acid sequence SYWMN (SEQ ID NO:276); a VH CDR2 comprising the amino acid sequence QIWPGDGDTNYNGKFKG (SEQ ID NO:277); and a VH CDR3 comprising the amino acid sequence RETTTVGRYYYAMDY (SEQ ID NO:278). In some cases, an anti-CD19 antibody includes a VL CDR1 comprising the amino acid sequence KASQSVDYDGDSYLN (SEQ ID NO:279); a VL CDR2 comprising the amino acid sequence DASNLVS (SEQ ID NO:280); a VL CDR3 comprising the amino acid sequence QQSTEDPWT (SEQ ID NO:281); a VH CDR1 comprising the amino acid sequence SYWMN (SEQ ID NO:282); a VH CDR2 comprising the amino acid sequence QIWPGDGDTNYNGKFKG (SEQ ID NO:283); and a VH CDR3 comprising the amino acid sequence RETTTVGRYYYAMDY (SEQ ID NO:284).

[0262] In some cases, an anti-CD19 antibody is a scFv. For example, in some cases, an anti-CD19 scFv comprises an amino acid sequence having at least 90%, at least 95%, at least 98%, at least 99%, or 100%, amino acid sequence identity to the following amino acid sequence:

(SEQ ID NO: 285)
DIQLTQSPASLAVSLGQRATISCKASQSVDYDGDSYLNWYQQIPGQPPKL
LIYDASNLVSGIPPRFSGSGSGTDFTLNIHPVEKVDAATYHCQQSTEDPW
TFGGGTKLEIKGGGGSGGGGSGGGGSQVQLQQSGAELVRPGSSVKISCKA
SGYAFSSYWMNWVKQRPGQGLEWIGQIWPGDGDTNYNGKFKGKATLTADE
SSSTAYMQLSSLASEDSAVYFCARRETTTVGRYYYAMDYWGQGTTVTVS.

### Anti-Mesothelin

[0263] Anti-mesothelin antibodies are known in the art; and the VH and VL, or the VH and VL CDRs, of any anti-mesothelin antibody can be used in a TMMP of the present disclosure. See, e.g., U.S. 2019/0000944; WO 2009/045957; WO 2014/031476; U.S. Pat. No. 8,460,660; US 2013/0066055; and WO 2009/068204.

[0264] In some cases, an anti-mesothelin antibody comprises: a) a light chain comprising an amino acid sequence having at least 90%, at least 95%, at least 98%, at least 99%, or 100%, amino acid sequence identity to the following amino acid sequence:

(SEQ ID NO: 286)
DIALTQPASVSGSPGQSITISCTGTSSDIGGYNSVSWYQQHPGKAPKLMI
YGVNNRPSGVSNRFSGSKSGNTASLTISGLQAEDEADYYCSSYDIESATP
VFGGGTKLTVLGQPKAAPSVTLFPPSSEELQANKATLVCLISDFYPGAVT
VAWKGDSSPVKAGVETTTPSKQSNNKYAASSYLSLTPEQWKSHRSYSCQV
THEGSTVEKTVAPTESS;

and

[0265] b) a heavy chain comprising an amino acid sequence having at least 90%, at least 95%, at least 98%, at least 99%, or 100%, amino acid sequence identity to the following amino acid sequence:

(SEQ ID NO: 287)
QVELVQSGAEVKKPGESLKISCKGSGYSFTSYWIGWVRQAPGKGLEWMGI
IDPGDSRTRYSPSFQGQVTISADKSISTAYLQWSSLKASDTAMYYCARGQ
LYGGTYMDGWGQGTLVTVSSASTKGPSVFPLAPSSKSTSGGTAALGCLVK
DYFPEPVTVSWNSGALTSGVHTFPAVLQSSGLYSLSSVVTVPSSSLGTQT
YICNVNHKPSNTKVDKKVEPKSCDKTHTCPPCPAPELLGGPSVFLFPPKP
KDTLMISRTPEVTCVVVDVSHEDPEVKFNWYVDGVEVHNAKTKPREEQYN
STYRVVSVLTVLHQDWLNGKEYKCKVSNKALPAPIEKTISKAKGQPREPQ
VYTLPPSRDELTKNQVSLTCLVKGFYPSDIAVEWESNGQPENNYKTTPPV
LDSDGSFFLYSKLTVDKSRWQQGNVFSCSVMHEALHNHYTQKSLSLSPG
K.

[0266] In some cases, an anti-mesothelin antibody comprises a VL present in the light chain amino acid sequence provided above; and a VH present in the heavy chain amino acid sequence provided above. For example, an anti-mesothelin antibody can comprise: a) a VL comprising an amino acid sequence having at least 90%, at least 95%, at least 98%, at least 99%, or 100%, amino acid sequence identity to the amino acid sequence: DIALTQPASVSGSPGQSITISCTGTSSDIGGYNSVSWYQQHPGKAPKLMIYGVNNRPSGVSNRFS GSKSGNTASLTISGLQAEDEADYYCSSYDIESATPVFGGGTK (SEQ ID NO: 288); and b) a VH comprising an amino acid sequence having at least 90%, at least 95%, at least 98%, at least 99%, or 100%, amino acid sequence identity to the amino acid sequence:

(SEQ ID NO: 289)
QVELVQSGAEVKKPGESLKISCKGSGYSFTSYWIGWVRQAPGKGLEWMGI
IDPGDSRTRYSPSFQGQVTISADKSISTAYLQWSSLKASDTAMYYCARGQ
LYGGTYMDGWGQGTLVTVSS.

[0267] In some cases, an anti-mesothelin antibody comprises VL CDR1, VL CDR2, and VL CDR3 present in the light chain amino acid sequence provided above; and VH CDR1, CDR2, and CDR3 present in the heavy chain amino acid sequence provided above. In some cases, the V_{H} and V_{L} CDRs are as defined by Kabat (see, e.g., Table 2, above; and Kabat 1991). In some cases, the V_{H} and V_{L} CDRs are as defined by Chothia (see, e.g., Table 2, above; and Chothia 1987).

[0268] For example, an anti-mesothelin antibody can comprise a VL CDR1 having the amino acid sequence TGTSSDIGGYNSVS (SEQ ID NO:290); a VL CDR2 having the amino acid sequence LMIYGVNNRPS (SEQ ID NO:291); a VL CDR3 having the amino acid sequence SSYDIESATP (SEQ ID NO:292); a VH CDR1 having the amino acid sequence GYSFTSYWIG (SEQ ID NO:293); a VH CDR2 having the amino acid sequence WMGIIDPGDSRTRYSP (SEQ ID NO:294); and a VH CDR3 having the amino acid sequence GQLYGGTYMDG (SEQ ID NO:295).

[0269] An anti-mesothelin antibody can be a scFv. As one non-limiting example, an anti-mesothelin scFv can comprise the following amino acid sequence:

(SEQ ID NO: 296)
QVQLQQSGAEVKKPGASVKVSCKASGYTFTGYYMHWVRQAPGQGLEWMGR
INPNSGGTNYAQKFQGRVTMTRDTSISTAYMELSRLRSEDTAVYYCARGR
YYGMDVWGQGTMVTVSSGGGGSGGGGSGGGGSGGGGSEIVLTQSPATLSL
SPGERATISCRASQSVSSNFAWYQQRPGQAPRLLIYDASNRATGIPPRFS
GSGSGTDFTLTISSLEPED FAAYYCHQRSNWLYTFGQGTKVDIK,

where VH CDR1, CDR2, and CDR3 are underlined; and VL CDR1, CDR2, and CDR3 are bolded and underlined.

[0270] As one non-limiting example, an anti-mesothelin scFv can comprise the following amino acid sequence:

(SEQ ID NO: 297)
QVQLVQSGAEVKKPGASVKVSCKASGYTFTGYYMHWVRQAPGQGLEWMG
WINPNSGGTNYAQKFQGRVTMTRDTSISTAYMELSRLRSDDTAVYYCAR
DLRRTVVTPRAYYGMDVWGQGTTVTVSSGGGGSGGGGSGGGGSGGGGSD
IQLTQSPSTLSASVGDRVTITCQASQDISNSLNWYQQKAGKAPKLLIY
DASTLETGVPSRFSGSGSGTDFSF
TISSLQPEDIATYYCQQHDNLPLTFGQGTKVEIK,

where VH CDR1, CDR2, and CDR3 are underlined; and VL CDR1, CDR2, and CDR3 are bolded and underlined.

### Anti-BCMA

[0271] Anti-BCMA (B-cell maturation antigen) antibodies are known in the art; and the VH and VL, or the VH and VL CDRs, of any anti-BCMA antibody can be used in a TMMP of the present disclosure. See, e.g., WO 2014/089335; and US 2019/0153061.

[0272] In some cases, an anti-BCMA antibody comprises: a) a light chain comprising an amino acid sequence having at least 90%, at least 95%, at least 98%, at least 99%, or 100%, amino acid sequence identity to the following amino acid sequence:

(SEQ ID NO: 298)
QSVLTQPPSASGTPGQRVTISCSGSSSNIGSNTVNWYQQLPGTAPKLLIF
NYHQRPSGVPDRFSGSKSGSSASLAISGLQSEDEADYYCAAWDDSLNGWV
FGGGTKLTVLGQPKAAPSVTLFPPSSEELQANKATLVCLISDFYPGAVTV
AWKADSSPVKAGVETTTPDSKQSNNKYAASSYLSLTPEQWKSHRSYSCQV
THEGSTVEKTVAPTECS;

and

[0273] b) a heavy chain comprising an amino acid sequence having at least 90%, at least 95%, at least 98%, at least 99%, or 100%, amino acid sequence identity to the following amino acid sequence

(SEQ ID NO: 299)
EVQLVESGGGLVKPGGSLRLSCAASGFTFGDYALSWFRQAPGKGLEWVGV
SRSKAYGGTTDYAASVKGRFTISRDDSKSTAYLQMNSLKTEDTAVYYCAS
SGYSSGWTPFDYWGQGTLVTVSSASTKGPSVFPLAPSSKSTSGGTAALGC
LVKDYFPEPVTVSWNSGALTSGVHTFPAVLQSSGLYSLSSVVTVPSSSLG
TQTYICNVNHKPSNTKVDKKVEPKSCDKTHTCPPCPAPELLGGPSVFLFP
PKPKDTLMISRTPEVTCVVVDVSHEDPEVKFNWYVDGVEVHNAKTKPREE
QYNSTYRVVSVLTVLHQDWLNGKEYKCKVSNKALPAPIEKTISKAKGQPR
EPQVYTLPPSREEMTKNQVSLTCLVKGFYPSDIAVEWESNGQPENNYKTT
PPVLDSDGSFFLYSKLTVDKSRWQQGNVFSCSVMHEALHNHYTQKSLSLS
PGK.

[0274] In some cases, an anti-mesothelin antibody comprises a VL present in the light chain amino acid sequence provided above; and a VH present in the heavy chain amino acid sequence provided above. For example, an anti-BCMA antibody can comprise: a) a VL comprising an amino acid sequence having at least 90%, at least 95%, at least 98%, at least 99%, or 100%, amino acid sequence identity to the amino acid sequence:

[0275] QSVLTQPPSASGTPGQRVTISCSGSSSNIGSNTVNWYQQLPGTAPKLLIFNYHQRPS GVPDRFSGSKSGSSASLAISGLQSEDEADYYCAAWDDSLNGWVFGGGTKLTVLG (SEQ ID NO:300); and b) a VH comprising an amino acid sequence having at least 90%, at least 95%, at least 98%, at least 99%, or 100%, amino acid sequence identity to the amino acid sequence:

(SEQ ID NO: 301)
EVQLVESGGGLVKPGGSLRLSCAASGFTFGDYALSWFRQAPGKGLEWVGV
SRSKAYGGTTDYAASVKGRFTISRDDSKSTAYLQMNSLKTEDTAVYYCAS
SGYSSGWTPFDYWGQGTLVTVSSASTKGPSV.

[0276] In some cases, an anti-BCMA antibody comprises VL CDR1, VL CDR2, and VL CDR3 present in the light chain amino acid sequence provided above; and VH CDR1, CDR2, and CDR3 present in the heavy chain amino acid sequence provided above. In some cases, the V_{H} and V_{L} CDRs are as defined by Kabat (see, e.g., Table 2, above; and Kabat 1991). In some cases, the V_{H} and V_{L} CDRs are as defined by Chothia (see, e.g., Table 2, above; and Chothia 1987).

[0277] For example, an anti-BCMA antibody can comprise a VL CDR1 having the amino acid sequence SSNIGSNT (SEQ ID NO:302), a VL CDR2 having the amino acid sequence NYH, a VL CDR3 having the amino acid sequence AAWDDSLNGWV (SEQ ID NO:303)), a VH CDR1 having the amino acid sequence GFTFGDYA (SEQ ID NO:304), a VH CDR2 having the amino acid sequence SRSKAYGGTT (SEQ ID NO:305), and a VH CDR3 having the amino acid sequence ASSGYSSGWTPFDY (SEQ ID NO:306).

[0278] An anti-BCMA antibody can be a scFv. As one non-limiting example, an anti-BCMA scFv can comprise the following amino acid sequence:

(SEQ ID NO: 307)
QVQLVQSGAEVKKPGSSVKVSCKASGGTFSNYWMHWVRQAPGQGLEWMGA
TYRGHSDTYYNQKFKGRVTITADKSTSTAYMELSSLRSEDTAVYYCARGA
IYNGYDVLDNWGQGTLVTVSSGGGGSGGGGSGGGGSGGGGSDIQMTQSPS
SLSASVGDRVTITCSASQDISNYLNWYQQKPGKAPKLLIYYTSNLHSGVP
SRFSGSGSGTDFTLTISSLQPEDFATYYCQQYRKLPWTFGQGTKLEIKR.

[0279] As another example, an anti-BCMA scFv can comprise the following amino acid sequence:

(SEQ ID NO: 308)
DIQMTQSPSSLSASVGDRVTITCSASQDISNYLNWYQQKPGKAPKLLIYY
TSNLHSGVPSRFSGSGSGTDFTLTISSLQPEDFATYYCQQYRKLPWTFGQ
GTKLEIKRGGGGSGGGGSGGGGSGGGGSQVQLVQSGAEVKKPGSSVKVSC
KASGGTFSNYWMHWVRQAPGQGLEWMGATYRGHSDTYYNQKFKGRVTITA
DKSTSTAYMELSSLRSEDTAVYYCARGAIYNGYDVLDNWGQGTLVTVSS.

### Single-Chain T-Cell Receptors

[0280] As noted above, in some cases, a TTP present in a TMMP of the present disclosure is a scTCR. A TTP can be a scTCR specific for a peptide/HLA complex on the surface of a cancer cell, where the peptide can be a cancer-associated peptide (e.g., a peptide fragment of a cancer-associated antigen). Amino acid sequences of scTCRs specific for cancer-associated peptides bound to an HLA complex are known in the art. See, e.g., US 2019/0135914; US 2019/0062398; and US 2018/0371049.

[0281] A scTCR includes an alpha chain variable region (Vα) and a beta chain variable region (Vβ) covalently linked through a suitable peptide linker sequence. For example, the Vα can be covalently linked to the Vβ through a suitable peptide linker (L) sequence fused to the C-terminus of the Vα and the N-terminus of the Vβ. An scTCR can have the structure Vα-L-Vβ. An scTCR can have the structure Vβ-L-Vα. An scTCR can also comprise a constant domain (also referred to as constant region). In some cases, an scTCR comprises, in order from N-terminus to C-terminus: i) a TCR α chain variable domain polypeptide; ii) a peptide linker; iii) a TCR β chain variable domain polypeptide; and iv) a TCR β chain constant region extracellular domain polypeptide. In some cases, an scTCR comprises, in order from N-terminus to C-terminus: i) a TCR β chain variable domain polypeptide; ii) a peptide linker; iii) a TCR α chain variable domain polypeptide; and iv) a TCR α chain constant region extracellular domain polypeptide.

[0282] Amino acid sequences of scTCRs specific for peptide/HLA complexes, where the peptide is a cancer-associated peptide, are known in the art. See, e.g., US 2019/0135914; US 2019/0062398; US 2018/0371049; US 2019/0144563; and US 2019/0119350.

[0283] For example, a scTCR can be specific for an NY-ESO epitope such as an SLLMWITQC peptide bound to an HLA complex comprising an HLA-A*0201 heavy chain and a β2M polypeptide. As an example, such an scTCR can comprise: i) a TCR α chain variable region comprising an amino acid sequence having at least 90%, at least 95%, at least 98%, at least 99%, or 100%, amino acid sequence identity to the amino acid sequence: MQEVTQIPAALSVPEGENLVLNCSFTDSAIYNLQWFRQDPGKGLTSLLLIQSSQREQTSGRLNAS LDKSSGRSTLYIAASQPGDSATYLCAVRPTSGGSYIPTFGRGTSLIVHPY (SEQ ID NO:353), where amino acid 20 can be V or A; amino acid 51 can be Q, P, S, T, or M; amino acid 52 can be S, P, F, or G, amino acid 53 can be S, W, H, or T; amino acid 94 can be P, H, or A; amino acid 95 can be T, L, M, A, Q, Y, E, I, F, V, N, G, S, D, or R; amino acid 96 can be S, L, T, Y, I, Q, V, E, A, W, R, G, H, D, or K; amino acid 97 can be G, D, N, V, S, T, or A; amino acid 98 can be G, P, H, S, T, W, or A; amino acid 99 can be S, T, Y, D, H, V, N, E, G, Q, K, A, I, or R; amino acid 100 can be Y, F, M, or D; amino acid 101 can be I, P, T, or M; and amino acid 103 can be T or A; and ii) a TCR β chain variable region comprising an amino acid sequence having at least 90%, at least 95%, at least 98%, at least 99%, or 100%, amino acid sequence identity to the amino acid sequence:

(SEQ ID NO: 354)
MGVTQTPKFQVLKTGQSMTLQCAQDMNHEYMSWYRQDPGMGLRLIHYSVG
AGITDQGEVPNGYNVSRSTTEDFPLRLLSAAPSQTSVYFCASSYVGNTGE
LFFGEGSRLTVL,

where amino acid 18 can be M or V; amino acid 50 can be G, V, or I; amino acid 52 can be G or Q; amino acid 53 can be I, T, or M; amino acid 55 can be D or R; amino acid 56 can be Q or R; amino acid 70 can be T or I; amino acid 94 can be Y, N, or F; amino acid 95 can be V or L; and amino acid 97 can be N, G, or D. For example, in some cases, a scTCR can comprise: i) a TCR α chain variable region comprising the amino acid sequence: MQEVTQIPAALSVPEGENLVLNCSFTDSAIYNLQWFRQDPGKGLTSLLLIMSHQREQTSGRLNA SLDKSSGRSTLYIAASQPGDSATYLCAVRPTSGGSYIPTFGRGTSLIVHPY (SEQ ID NO:355); and a TCR β chain variable region comprising the amino acid sequence:

(SEQ ID NO: 356)
MGVTQTPKFQVLKTGQSMTLQCAQDMNHEYMSWYRQDPGMGLRLIHYSVS
AGITDQGEVPNGYNVSRSTTEDFPLRLLSAAPSQTSVYFCASSYVGNTGE
LFFGEGSRLTVL.

[0284] As another example, a scTCR can be specific for an HPV peptide epitope (e.g., an HPV peptide of the amino acid sequence YIIFVYIPL (HPV 16 E5₆₃₋₇₁; SEQ ID NO:357), KLPQLCTEL (HPV 16 E6₁₁₋₁₉; SEQ ID NO:358), TIHEIILECV (HPV 16 E6; SEQ ID NO:359), YMLDLQPET (HPV 16 E7₁₁₋₁₉; SEQ ID NO:360), TLGIVCPI (HPV 16 E7₈₆₋₉₃; SEQ ID NO: 361), KCIDFYSRI (HPV 18 E6₆₇₋₇₅; SEQ ID NO:362), or FQQLFLNTL (HPV 18 E7₈₆₋₉₄; SEQ ID NO:363)) bound to an HLA complex comprising an HL heavy chain and a β2M polypeptide. As an example, such an scTCR can comprise: i) a TCR α chain variable region comprising an amino acid sequence having at least 90%, at least 95%, at least 98%, at least 99%, or 100%, amino acid sequence identity to the amino acid sequence: METLLGLLILQLQLQWVSSKQEVTQIPAALSVPEGENLVLNCSFTDSAIYNLQWFRQDPGKGLT SLLLIQSSQREQTSGRLNASLDKSSGRSTLYIAASQPGDSATYLCAVRETSGSRLTFGEGTQLTVN PD (SEQ ID NO:364); and ii) a TCR β chain variable region comprising an amino acid sequence having at least 90%, at least 95%, at least 98%, at least 99%, or 100%, amino acid sequence identity to the amino acid sequence:

(SEQ ID NO: 365)
MGIRLLCRVAFCFLAVGLVDVKVTQSSRYLVKRTGEKVFLECVQDMDHEN
MFWYRQDPGLGLRLIYFSYDVKMKEKGDIPEGYSVSREKKERFSLILESA
STNQTSMYLCASSFWGRSTDTQYFGPGTRLTVL.

[0285] Exemplary configurations The TTP can be present on the first polypeptide and/or the second polypeptide of a TMMP of the present disclosure. Thus, a TMMP of the present disclosure can comprise at least one heterodimer comprising: a) a first polypeptide comprising: i) a peptide epitope; and ii) first MHC polypeptide; b) a second polypeptide comprising a second MHC polypeptide, c) at least one immunomodulatory polypeptide, where the first and/or the second polypeptide comprises the immunomodulatory polypeptide; d) an Ig Fc polypeptide or a non-Ig scaffold, where the first and/or the second polypeptide comprises the Ig Fc polypeptide or the non-Ig scaffold; and e) a tumor-targeting polypeptide (TTP), where the first and/or the second polypeptide comprises the TTP. These components can be arranged in any of a variety of configurations. For example, in some cases, a TMMP of the present disclosure comprises: a) a first polypeptide comprising, in order from N-terminus to C-terminus: i) a MUC1 peptide; ii) a first MHC polypeptide; and iii) at least one immunomodulatory polypeptide; and b) a second polypeptide comprising, in order from N-terminus to C-terminus: i) a second MHC polypeptide; ii) an Ig Fc polypeptide; and iii) a TTP. As another example, in some cases, a TMMP of the present disclosure comprises: a) a first polypeptide comprising, in order from N-terminus to C-terminus: i) a MUC1 peptide; and ii) a first MHC polypeptide; and b) a second polypeptide comprising, in order from N-terminus to C-terminus: i) at least one immunomodulatory polypeptide; ii) a second MHC polypeptide; iii) an Ig Fc polypeptide; and iv) a TTP. As another example, in some cases, a TMMP of the present disclosure comprises: a) a first polypeptide comprising, in order from N-terminus to C-terminus: i) a MUC1 peptide; and ii) a first MHC polypeptide; and b) a second polypeptide comprising, in order from N-terminus to C-terminus: i) a second MHC polypeptide; ii) an Ig Fc polypeptide; iii) at least one immunomodulatory polypeptide; and iv) a TTP. As another example, in some cases, a TMMP of the present disclosure comprises: a) a first polypeptide comprising, in order from N-terminus to C-terminus: i) a MUC1 peptide; and ii) a first MHC polypeptide; and b) a second polypeptide comprising, in order from N-terminus to C-terminus: i) at least one immunomodulatory polypeptide; ii) a second MHC polypeptide; iii) an Ig Fc polypeptide; and iv) a TTP. As another example, in some cases, a TMMP of the present disclosure comprises: a) a first polypeptide comprising, in order from N-terminus to C-terminus: i) at least one immunomodulatory polypeptide; ii) a MUC1 peptide; and iii) a first MHC polypeptide; and b) a second polypeptide comprising, in order from N-terminus to C-terminus: i) a second MHC polypeptide; ii) an Ig Fc polypeptide; and iii) a TTP. As another example, in some cases, a TMMP of the present disclosure comprises: a) a first polypeptide comprising, in order from N-terminus to C-terminus: i) a MUC1 peptide; and ii) a first MHC polypeptide; and b) a second polypeptide comprising, in order from N-terminus to C-terminus: i) a second MHC polypeptide; ii) at least one immunomodulatory polypeptide; iii) an Ig Fc polypeptide; and iv) a TTP.

### Linkers

[0286] A TMMP of the present disclosure can include one or more linkers, where the one or more linkers are between one or more of: i) an MHC Class I polypeptide and an Ig Fc polypeptide, where such a linker is referred to herein as “L1”; ii) an immunomodulatory polypeptide and an MHC Class I polypeptide, where such a linker is referred to herein as “L2”; iii) a first immunomodulatory polypeptide and a second immunomodulatory polypeptide, where such a linker is referred to herein as “L3”; iv) a peptide antigen (“epitope”) and an MHC Class I polypeptide; v) an MHC Class I polypeptide and a dimerization polypeptide (e.g., a first or a second member of a dimerizing pair); and vi) a dimerization polypeptide (e.g., a first or a second member of a dimerizing pair) and an IgFc polypeptide.

[0287] Suitable linkers (also referred to as “spacers”) can be readily selected and can be of any of a number of suitable lengths, such as from 1 amino acid to 25 amino acids, from 3 amino acids to 20 amino acids, from 2 amino acids to 15 amino acids, from 3 amino acids to 12 amino acids, including 4 amino acids to 10 amino acids, 5 amino acids to 9 amino acids, 6 amino acids to 8 amino acids, or 7 amino acids to 8 amino acids. A suitable linker can be 1, 2, 3, 4, 5, 6, 7, 8, 9, 10, 11, 12, 13, 14, 15, 16, 17, 18, 19, 20, 21, 22, 23, 24, or 25 amino acids in length. In some cases, a linker has a length of from 25 amino acids to 50 amino acids, e.g., from 25 to 30, from 30 to 35, from 35 to 40, from 40 to 45, or from 45 to 50 amino acids in length.

[0288] Exemplary linkers include glycine polymers (G)ₙ, glycine-serine polymers (including, for example, (GS)ₙ, (GSGGS)ₙ (SEQ ID NO:366) and (GGGS)ₙ (SEQ ID NO:367), where n is an integer of at least one), glycine-alanine polymers, alanine-serine polymers, and other flexible linkers known in the art. Glycine and glycine-serine polymers can be used; both Gly and Ser are relatively unstructured, and therefore can serve as a neutral tether between components. Glycine polymers can be used; glycine accesses significantly more phi-psi space than even alanine, and is much less restricted than residues with longer side chains (see Scheraga, Rev. Computational Chem. 11173-142 (1992)). Exemplary linkers can comprise amino acid sequences including, but not limited to, GGSG (SEQ ID NO:368), GGSGG (SEQ ID NO: 369), GSGSG (SEQ ID NO:370), GSGGG (SEQ ID NO:371), GGGSG (SEQ ID NO:372), GSSSG (SEQ ID NO:373), and the like. Exemplary linkers can include, e.g., Gly(Ser₄)n (SEQ ID NO:374), where n is 1, 2, 3, 4, 5, 6, 7, 8, 9, or 10. In some cases, a linker comprises the amino acid sequence (GSSSS)n (SEQ ID NO:375), where n is 4. In some cases, a linker comprises the amino acid sequence (GSSSS)n (SEQ ID NO:376), where n is 5. In some cases, a linker comprises the amino acid sequence (GGGGS)n (SEQ ID NO:377), where n is 1. In some cases, a linker comprises the amino acid sequence (GGGGS)n (SEQ ID NO:378), where n is 2. In some cases, a linker comprises the amino acid sequence (GGGGS)n (SEQ ID NO:379), where n is 3. In some cases, a linker comprises the amino acid sequence (GGGGS)n (SEQ ID NO:380), where n is 4. In some cases, a linker comprises the amino acid sequence (GGGGS)n (SEQ ID NO:381), where n is 5. In some cases, a linker comprises the amino acid sequence (GGGGS)n (SEQ ID NO:382), where n is 6. In some cases, a linker comprises the amino acid sequence (GGGGS)n (SEQ ID NO:383), where n is 7, In some cases, a linker comprises the amino acid sequence (GGGGS)n (SEQ ID NO:384), where n is 8, In some cases, a linker comprises the amino acid sequence (GGGGS)n (SEQ ID NO:385), where n is 9, In some cases, a linker comprises the amino acid sequence (GGGGS)n (SEQ ID NO:386), where n is 10. In some cases, a linker comprises the amino acid sequence AAAGG (SEQ ID NO:387).

[0289] In some cases, a linker polypeptide, present in a first polypeptide of a TMMP of the present disclosure, includes a cysteine residue that can form a disulfide bond with a cysteine residue present in a second polypeptide of a TMMP of the present disclosure. In some cases, for example, a suitable linker comprises the amino acid sequence GCGGSGGGGSGGGGS (SEQ ID NO:388). As another example, a suitable linker can comprise the amino acid sequence GCGGS(G4S)n (SEQ ID NO:389), where n is 1, 2, 3, 4, 5, 6, 7, 8, or 9. For example, in some cases, the linker comprises the amino acid sequence GCGGSGGGGSGGGGSGGGGS (SEQ ID NO:390). As another example, the linker comprises the amino acid sequence GCGGSGGGGSGGGGS (SEQ ID NO:391).

### MUC1 Peptides

[0290] As discussed above, a TMMP of the present disclosure comprises a MUC1 peptide that is typically at least about 4 amino acids in length, and presents a MUC1 epitope to a T cell when in an MHC/peptide complex (e.g., an HLA/peptide complex).

[0291] A MUC1 peptide present in a TMMP of the present disclosure can have a length of at least 4 amino acids, e.g., from 4 amino acids to about 25 amino acids in length (e.g., 4 amino acids (aa), 5 aa, 6 aa, 7 aa, 8 aa, 9 aa, 10 aa, 11 aa, 12 aa, 13 aa, 14 aa, 15 aa, 16 aa, 17 aa, 18 aa, 19 aa, 20 aa, 21 aa, 22 aa, 23 aa, 24 aa, or 25 aa, including within a range of from 4 to 20 amino acids, from 6 to 18 amino acids, from 8 to 15 amino acids, from 8 to 12 amino acids, from 5 to 10 amino acids, from 10 to 20 amino acids, and from 15 to 25 amino acids in length).

[0292] A MUC1 epitope present in a TMMP of the present disclosure is a peptide specifically bound by a T-cell, i.e., the epitope is specifically bound by an epitope-specific T cell. An epitope-specific T cell binds an epitope having a reference amino acid sequence, but does not substantially bind an epitope that differs from the reference amino acid sequence. For example, an epitope-specific T cell binds an epitope having a reference amino acid sequence, and binds an epitope that differs from the reference amino acid sequence, if at all, with an affinity that is less than 10⁻⁶ M, less than 10⁻⁵ M, or less than 10⁻⁴ M. An epitope-specific T cell can bind an epitope for which it is specific with an affinity of at least 10⁻⁷ M, at least 10⁻⁸ M, at least 10⁻⁹ M, or at least 10¹⁰ M.

[0293] In some cases, a suitable MUC1 peptide is a peptide of at least 4 amino acids in length, e.g., from 4 amino acids to about 25 amino acids (e.g., 4 amino acids (aa), 5 aa, 6 aa, 7 aa, 8 aa, 9 aa, 10 aa, 11 aa, 12 aa, 13 aa, 14 aa, 15 aa, 16 aa, 17 aa, 18 aa, 19 aa, 20 aa, 21 aa, 22 aa, 23 aa, 24 aa, or 25 aa, including within a range of from 4 to 20 amino acids, from 6 to 18 amino acids, from 8 to 15 amino acids, from 8 to 12 amino acids, from 5 to 10 amino acids, from 10 to 20 amino acids, and from 15 to 25 amino acids in length) of a MUC1 polypeptide comprising an amino acid sequence having at least 80%, at least 85%, at least 90%, at least 95%, at least 98%, at least 99%, or 100%, amino acid sequence identity to the following MUC1 amino acid sequence (full length human MUC1 isoform 1 protein precursor (isoform 1, Uniprot P15941-1)):

(SEQ ID NO: 573)
MTPGTQSPFF LLLLLTVLTV VTGSGHASST PGGEKETSAT
QRSSVPSSTE KNAVSMTSSV LSSHSPGSGS STTQGQDVTL
APATEPASGS AATWGQDVTS VPVTRPALGS TTPPAHDVTS
APDNKPAPGS TAPPAHGVTS APDTRPAPGS TAPPAHGVTS
APDTRPAPGS TAPPAHGVTS APDTRPAPGS TAPPAHGVTS
APDTRPAPGS TAPPAHGVTS APDTRPAPGS TAPPAHGVTS
APDTRPAPGS TAPPAHGVTS APDTRPAPGS TAPPAHGVTS
APDTRPAPGS TAPPAHGVTS APDTRPAPGS TAPPAHGVTS
APDTRPAPGS TAPPAHGVTS APDTRPAPGS TAPPAHGVTS
APDTRPAPGS TAPPAHGVTS APDTRPAPGS TAPPAHGVTS
APDTRPAPGS TAPPAHGVTS APDTRPAPGS TAPPAHGVTS
APDTRTAPGS TAPPAHGVTS APDTRPAPGS TAPPAHGVTS
APDTRPAPGS TAPPAHGVTS APDTRPAPGS TAPPAHGVTS
APDTRPAPGS TAPPAHGVTS APDTRPAPGS TAPPAHGVTS
APDTRPAPGS TAPPAHGVTS APDTRPAPGS TAPPAHGVTS
APDTRPAPGS TAPPAHGVTS APDTRPAPGS TAPPAHGVTS
APDTRPAPGS TAPPAHGVTS APDTRPAPGS TAPPAHGVTS
APDTRPAPGS TAPPAHGVTS APDTRPAPGS TAPPAHGVTS
APDTRPAPGS TAPPAHGVTS APDTRPAPGS TAPPAHGVTS
APDTRPAPGS TAPPAHGVTS APDTRPAPGS TAPPAHGVTS
APDTRPAPGS TAPPAHGVTS APDTRPAPGS TAPPAHGVTS
APDTRPAPGS TAPPAHGVTS APDTRPAPGS TAPPAHGVTS
APDTRPAPGS TAPPAHGVTS APDTRPAPGS TAPPAHGVTS
APDTRPAPGS TAPPAHGVTS APDNRPALGS TAPPVHNVTS
ASGSASGSAS TLVHNGTSAR ATTTPASKST PFSIPSHHSD
TPTTLASHST KTDASSTHHS SVPPLTSSNH STSPQLSTGV
SFFFLSFHIS NLQFNSSLED PSTDYYQELQ RDISEMFLQI
YKQGGFLGLS NIKFRPGSVV VQLTLAFREG TINVHDVETQ
FNQYKTEAAS RYNLTISDVS VSDVPFPFSA QSGAGVPGWG
IALLVLVCVL VALAIVYLIA LAVCQCRRKN YGQLDIFPAR
DTYHPMSEYP TYHTHGRYVP PSSTDRSPYE KVSAGNGGSS
LSYTNPAVAA TSANL.

[0294] In some cases, a suitable MUC1 peptide is a peptide of at least 4 amino acids in length, e.g., from 4 amino acids to about 25 amino acids (e.g., 4 amino acids (aa), 5 aa, 6 aa, 7 aa, 8 aa, 9 aa, 10 aa, 11 aa, 12 aa, 13 aa, 14 aa, 15 aa, 16 aa, 17 aa, 18 aa, 19 aa, 20 aa, 21 aa, 22 aa, 23 aa, 24 aa, or 25 aa, including within a range of from 4 to 20 amino acids, from 6 to 18 amino acids, from 8 to 15 amino acids, from 8 to 12 amino acids, from 5 to 10 amino acids, from 10 to 20 amino acids, and from 15 to 25 amino acids in length) of a MUC1 polypeptide comprising an amino acid sequence having at least 80%, at least 85%, at least 90%, at least 95%, at least 98%, at least 99%, or 100%, amino acid sequence identity to the following Homo sapiens MUC1 isoform 2 amino acid sequence:

(SEQ ID NO: 574)
MTPGTQSPFF LLLLLTVLTA TTAPKPATVV TGSGHASSTP
GGEKETSATQ RSSVPSSTEK NAFNSSLEDP STDYYQELQR
DISEMFLQIY KQGGFLGLSN IKFRPGSVVV QLTLAFREGT
INVHDVETQF NQYKTEAASR YNLTISDVSV SDVPFPFSAQ
SGAGVPGWGI ALLVLVCVLV ALAIVYLIAL AVCQCRRKNY
GQLDIFPARD TYHPMSEYPT YHTHGRYVPP SSTDRSPYEK
VSAGNGGSSL SYTNPAVAAT SANL.

[0295] In some cases, a suitable MUC1 peptide is a peptide of at least 4 amino acids in length, e.g., from 4 amino acids to about 25 amino acids (e.g., 4 amino acids (aa), 5 aa, 6 aa, 7 aa, 8 aa, 9 aa, 10 aa, 11 aa, 12 aa, 13 aa, 14 aa, 15 aa, 16 aa, 17 aa, 18 aa, 19 aa, 20 aa, 21 aa, 22 aa, 23 aa, 24 aa, or 25 aa, including within a range of from 4 to 20 amino acids, from 6 to 18 amino acids, from 8 to 15 amino acids, from 8 to 12 amino acids, from 5 to 10 amino acids, from 10 to 20 amino acids, and from 15 to 25 amino acids in length) of a MUC1 polypeptide comprising an amino acid sequence having at least 80%, at least 85%, at least 90%, at least 95%, at least 98%, at least 99%, or 100%, amino acid sequence identity to the following Homo sapiens MUC1 isoform 3 amino acid sequence:

(SEQ ID NO: 575)
MTPGTQSPFF LLLLLTVLTV VTGSGHASST PGGEKETSAT
QRSSVPSSTE KNAFNSSLED PSTDYYQELQ RDISEMFLQI
YKQGGFLGLS NIKFRPGSVV VQLTLAFREG TINVHDVETQ
FNQYKTEAAS RYNLTISDVS VSDVPFPFSA QSGAGVPGWG
IALLVLVCVL VALAIVYLIA LAVCQCRRKN YGQLDIFPAR
DTYHPMSEYP TYHTHGRYVP PSSTDRSPYE KVSAGNGGSS
LSYTNPAVAA TSANL.

[0296] In some cases, a suitable MUC1 peptide is a peptide of at least 4 amino acids in length, e.g., from 4 amino acids to about 25 amino acids (e.g., 4 amino acids (aa), 5 aa, 6 aa, 7 aa, 8 aa, 9 aa, 10 aa, 11 aa, 12 aa, 13 aa, 14 aa, 15 aa, 16 aa, 17 aa, 18 aa, 19 aa, 20 aa, 21 aa, 22 aa, 23 aa, 24 aa, or 25 aa, including within a range of from 4 to 20 amino acids, from 6 to 18 amino acids, from 8 to 15 amino acids, from 8 to 12 amino acids, from 5 to 10 amino acids, from 10 to 20 amino acids, and from 15 to 25 amino acids in length) of a MUC1 polypeptide comprising an amino acid sequence having at least 80%, at least 85%, at least 90%, at least 95%, at least 98%, at least 99%, or 100%, amino acid sequence identity to the following Homo sapiens MUC1 isoform 5 amino acid sequence:

(SEQ ID NO: 576)
MTPGTQSPFF LLLLLTVLTV VTGSGHASST PGGEKETSAT
QRSSVPSSTE KNAIPAPTTT KSCRETFLKC FCRFINKGVF
WASPILSSVS DVPFPFSAQS GAGVPGWGIA LLVLVCVLVA
LAIVYLIALA VCQCRRKNYG QLDIFPARDT YHPMSEYPTY
HTHGRYVPPS STDRSPYEKV SAGNGGSSLS YTNPAVAATS ANL.

[0297] In some cases, a suitable MUC1 peptide is a peptide of at least 4 amino acids in length, e.g., from 4 amino acids to about 25 amino acids (e.g., 4 amino acids (aa), 5 aa, 6 aa, 7 aa, 8 aa, 9 aa, 10 aa, 11 aa, 12 aa, 13 aa, 14 aa, 15 aa, 16 aa, 17 aa, 18 aa, 19 aa, 20 aa, 21 aa, 22 aa, 23 aa, 24 aa, or 25 aa, including within a range of from 4 to 20 amino acids, from 6 to 18 amino acids, from 8 to 15 amino acids, from 8 to 12 amino acids, from 5 to 10 amino acids, from 10 to 20 amino acids, and from 15 to 25 amino acids in length) of a MUC1 polypeptide comprising an amino acid sequence having at least 80%, at least 85%, at least 90%, at least 95%, at least 98%, at least 99%, or 100%, amino acid sequence identity to the following Homo sapiens MUC1 isoform 6 amino acid sequence:

(SEQ ID NO: 577)
MTPGTQSPFF LLLLLTVLTV VTGSGHASST PGGEKETSAT
QRSSVPSSTE KNAFNSSLED PSTDYYQELQ RDISEMAVCQ
CRRKNYGQLD IFPARDTYHP MSEYPTYHTH GRYVPPSSTD
RSPYEKVSAG NGGSSLSYTN PAVAATSANL.

[0298] In some cases, a suitable MUC1 peptide is a peptide of at least 4 amino acids in length, e.g., from 4 amino acids to about 25 amino acids (e.g., 4 amino acids (aa), 5 aa, 6 aa, 7 aa, 8 aa, 9 aa, 10 aa, 11 aa, 12 aa, 13 aa, 14 aa, 15 aa, 16 aa, 17 aa, 18 aa, 19 aa, 20 aa, 21 aa, 22 aa, 23 aa, 24 aa, or 25 aa, including within a range of from 4 to 20 amino acids, from 6 to 18 amino acids, from 8 to 15 amino acids, from 8 to 12 amino acids, from 5 to 10 amino acids, from 10 to 20 amino acids, and from 15 to 25 amino acids in length) of a MUC1 polypeptide comprising an amino acid sequence having at least 80%, at least 85%, at least 90%, at least 95%, at least 98%, at least 99%, or 100%, amino acid sequence identity to the following Homo sapiens MUC1 isoform 7 amino acid sequence:

(SEQ ID NO: 578)
MTPGTQSPFF LLLLLTVLTA TTAPKPATVV TGSGHASSTP
GGEKETSATQ RSSVPSSTEK NAFNSSLEDP STDYYQELQR
DISEMAVCQC RRKNYGQLDI FPARDTYHPM SEYPTYHTHG
RYVPPSSTDR SPYEKVSAGN GGSSLSYTNP AVAATSANL.

[0299] In some cases, a suitable MUC1 peptide is a peptide of at least 4 amino acids in length, e.g., from 4 amino acids to about 25 amino acids (e.g., 4 amino acids (aa), 5 aa, 6 aa, 7 aa, 8 aa, 9 aa, 10 aa, 11 aa, 12 aa, 13 aa, 14 aa, 15 aa, 16 aa, 17 aa, 18 aa, 19 aa, 20 aa, 21 aa, 22 aa, 23 aa, 24 aa, or 25 aa, including within a range of from 4 to 20 amino acids, from 6 to 18 amino acids, from 8 to 15 amino acids, from 8 to 12 amino acids, from 5 to 10 amino acids, from 10 to 20 amino acids, and from 15 to 25 amino acids in length) of a MUC1 polypeptide comprising an amino acid sequence having at least 80%, at least 85%, at least 90%, at least 95%, at least 98%, at least 99%, or 100%, amino acid sequence identity to the following Homo sapiens MUC1 isoform 8 amino acid sequence:

(SEQ ID NO: 579)
MTPGTQSPFF LLLLLTVLTV VTGSGHASST PGGEKETSAT
QRSSVPSSTE KNAIPAPTTT KSCRETFLKC FCRFINKGVF
WASPILSSVW GWGARLGHRA AGAGLCSGCA GHCLSHCLGC
LSVPPKELRA AGHLSSPGYL PSYERVPHLP HPWALCAP.

[0300] In some cases, a suitable MUC1 peptide is a peptide of at least 4 amino acids in length, e.g., from 4 amino acids to about 25 amino acids (e.g., 4 amino acids (aa), 5 aa, 6 aa, 7 aa, 8 aa, 9 aa, 10 aa, 11 aa, 12 aa, 13 aa, 14 aa, 15 aa, 16 aa, 17 aa, 18 aa, 19 aa, 20 aa, 21 aa, 22 aa, 23 aa, 24 aa, or 25 aa, including within a range of from 4 to 20 amino acids, from 6 to 18 amino acids, from 8 to 15 amino acids, from 8 to 12 amino acids, from 5 to 10 amino acids, from 10 to 20 amino acids, and from 15 to 25 amino acids in length) of a MUC1 polypeptide comprising an amino acid sequence having at least 80%, at least 85%, at least 90%, at least 95%, at least 98%, at least 99%, or 100%, amino acid sequence identity to the following Homo sapiens MUC1 isoform 9 amino acid sequence:

(SEQ ID NO: 580)
MTPGTQSPFF LLLLLTVLTV VTGSGHASST PGGEKETSAT
QRSSVPSSTE KNAVSMTSSV LSSHSPGSGS STTQGQDVTL
APATEPASGS AATWGQDVTS VPVTRPALGS TTPPAHDVTS
APDNKPAPGS TAPPAHGVTS APDTRPAPGS TAPPAHGVTS
APDNRPALGS TAPPVHNVTS ASGSASGSAS TLVHNGTSAR
ATTTPASKST PFSIPSHHSD TPTTLASHST KTDASSTHHS
TVPPLTSSNH STSPQLSTGV SFFFLSFHIS NLQFNSSLED
PSTDYYQELQ RDISEMFLQI YKQGGFLGLS NIKFRPGSVV
VQLTLAFREG TINVHDVETQ FNQYKTEAAS RYNLTISDVS
VSDVPFPFSA QSGAGVPGWG IALLVLVCVL VALAIVYLIA
LAVCQCRRKN YGQLDIFPAR DTYHPMSEYP TYHTHGRYVP
PSSTDRSPYE KVSAGNGGSS LSYTNPAVAA TSANL.

[0301] In some cases, a suitable MUC1 peptide is a peptide of at least 4 amino acids in length, e.g., from 4 amino acids to about 25 amino acids (e.g., 4 amino acids (aa), 5 aa, 6 aa, 7 aa, 8 aa, 9 aa, 10 aa, 11 aa, 12 aa, 13 aa, 14 aa, 15 aa, 16 aa, 17 aa, 18 aa, 19 aa, 20 aa, 21 aa, 22 aa, 23 aa, 24 aa, or 25 aa, including within a range of from 4 to 20 amino acids, from 6 to 18 amino acids, from 8 to 15 amino acids, from 8 to 12 amino acids, from 5 to 10 amino acids, from 10 to 20 amino acids, and from 15 to 25 amino acids in length) of a MUC1 polypeptide comprising an amino acid sequence having at least 80%, at least 85%, at least 90%, at least 95%, at least 98%, at least 99%, or 100%, amino acid sequence identity to the following Homo sapiens MUC1 isoform 11 amino acid sequence:

(SEQ ID NO: 581)
MTPGTQSPFF LLLLLTVLTA TTAPKPATVV TGSGHASSTP
GGEKETSATQ RSSVPSSTEK NALSTGVSFF FLSFHISNLQ
FNSSLEDPST DYYQELQRDI SEMFLQIYKQ GGFLGLSNIK
FRPGSVVVQL TLAFREGTIN VHDVETQFNQ YKTEAASRYN
LTISDVSVSD VPFPFSAQSG AGVPGWGIAL LVLVCVLVAL
AIVYLIALAV CQCRRKNYGQ LDIFPARDTY HPMSEYPTYH
THGRYVPPSS TDRSPYEKVS AGNGGSSLSY TNPAVAATSA
NL.

[0302] In some cases, a suitable MUC1 peptide is a peptide of at least 4 amino acids in length, e.g., from 4 amino acids to about 25 amino acids (e.g., 4 amino acids (aa), 5 aa, 6 aa, 7 aa, 8 aa, 9 aa, 10 aa, 11 aa, 12 aa, 13 aa, 14 aa, 15 aa, 16 aa, 17 aa, 18 aa, 19 aa, 20 aa, 21 aa, 22 aa, 23 aa, 24 aa, or 25 aa, including within a range of from 4 to 20 amino acids, from 6 to 18 amino acids, from 8 to 15 amino acids, from 8 to 12 amino acids, from 5 to 10 amino acids, from 10 to 20 amino acids, and from 15 to 25 amino acids in length) of a MUC1 polypeptide comprising an amino acid sequence having at least 80%, at least 85%, at least 90%, at least 95%, at least 98%, at least 99%, or 100%, amino acid sequence identity to the following Homo sapiens MUC1 isoform 12 amino acid sequence:

(SEQ ID NO: 582)
MTPGTQSPFF LLLLLTVLTA TTAPKPATVV TGSGHASSTP
GGEKETSATQ RSSVPSSTEK NAFNSSLEDP STDYYQELQR
DISEMFLQIY KQGGFLGLSN IKFRPGSVVV QLTLAFREGT
INVHDVETQF NQYKTEAASR YNLTISDVSV WGWGARLGHR
AAGAGLCSGC AGHCLSHCLG CLSVPPKELR AAGHLSSPGY
LPSYERVPHL PHPWALCAP.

[0303] In some cases, a suitable MUC1 peptide is a peptide of at least 4 amino acids in length, e.g., from 4 amino acids to about 25 amino acids (e.g., 4 amino acids (aa), 5 aa, 6 aa, 7 aa, 8 aa, 9 aa, 10 aa, 11 aa, 12 aa, 13 aa, 14 aa, 15 aa, 16 aa, 17 aa, 18 aa, 19 aa, 20 aa, 21 aa, 22 aa, 23 aa, 24 aa, or 25 aa, including within a range of from 4 to 20 amino acids, from 6 to 18 amino acids, from 8 to 15 amino acids, from 8 to 12 amino acids, from 5 to 10 amino acids, from 10 to 20 amino acids, and from 15 to 25 amino acids in length) of a MUC1 polypeptide comprising an amino acid sequence having at least 80%, at least 85%, at least 90%, at least 95%, at least 98%, at least 99%, or 100%, amino acid sequence identity to the following Homo sapiens MUC1 isoform 13 amino acid sequence:

(SEQ ID NO: 583)
MTPGTQSPFF LLLLLTVLTA TTAPKPATVV TGSGHASSTP
GGEKETSATQ RSSVPSSTEK NAIYKQGGFL GLSNIKFRPG
SVVVQLTLAF REGTINVHDV ETQFNQYKTE AASRYNLTIS
DVSVSDVPFP FSAQSGAGVP GWGIALLVLV CVLVALAIVY
LIALAVCQCR RKNYGQLDIF PARDTYHPMS EYPTYHTHGR
YVPPSSTDRS PYEKVSAGNG GSSLSYTNPA VAATSANL.

[0304] In some cases, a suitable MUC1 peptide is a peptide of at least 4 amino acids in length, e.g., from 4 amino acids to about 25 amino acids (e.g., 4 amino acids (aa), 5 aa, 6 aa, 7 aa, 8 aa, 9 aa, 10 aa, 11 aa, 12 aa, 13 aa, 14 aa, 15 aa, 16 aa, 17 aa, 18 aa, 19 aa, 20 aa, 21 aa, 22 aa, 23 aa, 24 aa, or 25 aa, including within a range of from 4 to 20 amino acids, from 6 to 18 amino acids, from 8 to 15 amino acids, from 8 to 12 amino acids, from 5 to 10 amino acids, from 10 to 20 amino acids, and from 15 to 25 amino acids in length) of a MUC1 polypeptide comprising an amino acid sequence having at least 80%, at least 85%, at least 90%, at least 95%, at least 98%, at least 99%, or 100%, amino acid sequence identity to the following Homo sapiens MUC1 isoform 14 amino acid sequence:

(SEQ ID NO: 584)
MTPGTQSPFF LLLLLTVLTG GEKETSATQR SSVPSSTEKN
AIYKQGGFLG LSNIKFRPGS VVVQLTLAFR EGTINVHDVE
TQFNQYKTEA ASRYNLTISD VSVSDVPFPF SAQSGAGVPG
WGIALLVLVC VLVALAIVYL IALAVCQCRR KNYGQLDIFP
ARDTYHPMSE YPTYHTHGRY VPPSSTDRSP YEKVSAGNGG
SSLSYTNPAV AATSANL.

[0305] In some cases, a suitable MUC1 peptide is a peptide of at least 4 amino acids in length, e.g., from 4 amino acids to about 25 amino acids (e.g., 4 amino acids (aa), 5 aa, 6 aa, 7 aa, 8 aa, 9 aa, 10 aa, 11 aa, 12 aa, 13 aa, 14 aa, 15 aa, 16 aa, 17 aa, 18 aa, 19 aa, 20 aa, 21 aa, 22 aa, 23 aa, 24 aa, or 25 aa, including within a range of from 4 to 20 amino acids, from 6 to 18 amino acids, from 8 to 15 amino acids, from 8 to 12 amino acids, from 5 to 10 amino acids, from 10 to 20 amino acids, and from 15 to 25 amino acids in length) of a MUC1 polypeptide comprising an amino acid sequence having at least 80%, at least 85%, at least 90%, at least 95%, at least 98%, at least 99%, or 100%, amino acid sequence identity to the following Homo sapiens MUC1 isoform 15 amino acid sequence:

(SEQ ID NO: 585)
MTPGTQSPFF LLLLLTVLTA TTAPKPATVV TGSGHASSTP
GGEKETSATQ RSSVPSSTEK NAFLQIYKQG GFLGLSNIKF
RPGSVVVQLT LAFREGTINV HDVETQFNQY KTEAASRYNL
TISDVSVSDV PFPFSAQSGA GVPGWGIALL VLVCVLVALA
IVYLIALAVC QCRRKNYGQL DIFPARDTYH PMSEYPTYHT
HGRYVPPSST DRSPYEKVSA GNGGSSLSYT NPAVAATSAN
L.

[0306] Non-limiting examples of suitable MUC1 peptides include: i) STAPPAHGV (SEQ ID NO:586); ii) STAPPVHNV (SEQ ID NO:587); iii) SLAPPVHNV (SEQ ID NO:588); iv) SLAPPAHGV (SEQ ID NO:589); v) SAPDTRPAP (SEQ ID NO:590); vi) VTSAPDTRPAPGSTAPPAHG (SEQ ID NO: 591); vii) PDTRPAPGSTAPPAHGVTSA (SEQ ID NO:592); and viii) LLLLTVLTV (SEQ ID NO:593).

[0307] In some cases, the MUC1 peptide present in a TMMP of the present disclosure presents an epitope specific to an HLA-A, -B, -C, -E, -F, or -G allele. In an embodiment, the MUC1 peptide present in a TMMP presents an epitope restricted to HLA-A*0101, A*0201, A*0301, A*1101, A*2301, A*2402, A*2407, A*3303, and/or A*3401. In an embodiment, the epitope peptide present in a TMMP presents an epitope restricted to HLA-B*0702, B*0801, B*1502, B*3802, B*4001, B*4601, and/or B*5301. In an embodiment, the epitope peptide present in a TMMP presents an epitope restricted to C*0102, C*0303, C*0304, C*0401, C*0602, C*0701, C*702, C*0801, and/or C*1502.

[0308] As one example, the MUC1 peptide STAPPAHGV (SEQ ID NO:586) presents an epitope when bound to an HLA complex comprising a β2M polypeptide and an A*1101 HLA-A heavy chain. As another example, the MUC1 peptide STAPPAHGV (SEQ ID NO:586) presents an epitope when bound to an HLA complex comprising a β2M polypeptide and an A*0201 HLA-A heavy chain. As another example, the MUC1 peptide STAPPVHNV (SEQ ID NO:587) presents an epitope when bound to an HLA complex comprising a β2M polypeptide and an A*0201 HLA-A heavy chain. As another example, the MUC1 peptide SLAPPVHNV (SEQ ID NO:588) presents an epitope when bound to an HLA complex comprising a β2M polypeptide and an A*0201 HLA-A heavy chain. As another example, the MUC1 peptide SLAPPAHGV (SEQ ID NO:589) presents an epitope when bound to an HLA complex comprising a β2M polypeptide and an A*0201 HLA-A heavy chain.

### HLA/Peptide Binding Assays

[0309] Whether a given peptide (e.g., a MUC1 peptide that comprises a MUC1 epitope) binds a class I HLA (comprising an HLA heavy chain and a β2M polypeptide), and, when bound to the HLA complex, can effectively present an epitope to a TCR, can be determined using any of a number of well-known methods. Assays include binding assays and T-cell activation assays.

### Cell-Based Binding Assay

[0310] As one example, a cell-based peptide-induced stabilization assay can be used to determine peptide-HLA class I binding. In this assay, a peptide of interest is allowed to bind to a TAP-deficient cell, i.e., a cell that has defective transporter associated with antigen processing (TAP) machinery, and consequently, few surface class I molecules. Such cells include, e.g., the human T2 cell line (T2 (174×CEM.T2; American Type Culture Collection (ATCC) No. CRL-1992). Henderson et al. (1992) Science 255:1264. Without efficient TAP-mediated transport of cytosolic peptides into the endoplasmic reticulum, assembled class I complexes are structurally unstable, and retained only transiently at the cell surface. However, when T2 cells are incubated with an exogenous peptide capable of binding class I, surface peptide-HLA class I complexes are stabilized and can be detected by flow cytometry with, e.g., a pan anti-class I monoclonal antibody. The stabilization and resultant increased life-span of peptide-HLA complexes on the cell surface by the addition of a peptide validates their identity. Analysis can be carried out using flow cytometry, e.g., where the pan-HLA class I antibody comprises a fluorescent label. Binding of the peptide to various allelic forms of HLA H chains can be tested by genetically modifying the T2 cells to express an allelic HLA H chain of interest.

[0311] The following is a non-limiting example of use of a T2 assay to assess peptide binding to HLA A*0201. T2 cells are washed in cell culture medium, and concentrated to 10⁶ cells/ml. Peptides of interest are prepared in cell culture medium and serially diluted providing concentrations of 200 μM, 100 μM, 20 μM and 2 μM. The cells are mixed 1:1 with each peptide dilution to give a final volume of 200 L and final peptide concentrations of 100 μM, 50 μM, 10 μM and 1 μM. A HLA A*0201 binding peptide, GILGFVFTL, and a non-HLA A*0201-restricted peptide, HPVGEADYF (HLA-B*3501), are included as positive and negative controls, respectively. The cell/peptide mixtures are kept at 37° C. 5% CO₂ for ten minutes; then incubated at room temperature overnight. Cells are then incubated for 2 hours at 37° C. and stained with a fluorescently-labeled anti-human HLA antibody. The cells are washed twice with phosphate-buffered saline and analyzed using flow cytometry. The average mean fluorescence intensity (MFI) of the anti-HLA antibody staining is used to measure the strength of binding.

### Biochemical Binding Assay

[0312] HLA polypeptides (HLA heavy chain polypeptide complexed with β2M polypeptide) can be tested for binding to a peptide of interest in a cell-free in vitro assay system. For example, a labeled reference peptide (e.g., fluorescently labeled) is allowed to bind to HLA polypeptides (HLA heavy chain polypeptide complexed with β2M polypeptide), to form an HLA-reference peptide complex. The ability of a test peptide of interest to displace the labeled reference peptide from the HLA-reference peptide complex is tested. The relative binding affinity is calculated as the amount of test peptide needed to displace the bound reference peptide. See, e.g., van der Burg et al. (1995) Human Immunol. 44:189.

[0313] As another example, a peptide of interest can be incubated with an HLA molecule (HLA heavy chain complexed with a β2M polypeptide), and the stabilization of the HLA/peptide complex can be measured in an immunoassay format. The ability of a peptide of interest to stabilize an HLA molecule is compared to that of a control peptide presenting a known T-cell epitope. Detection of stabilization is based on the presence or absence of the native conformation of the HLA/peptide complex, detected using an anti-HLA antibody. See, e.g., Westrop et al. (2009) J. Immunol. Methods 341:76; Steinitz et al. (2012) Blood 119:4073; and U.S. Pat. No. 9,205,144.

### T-Cell Activation Assays

[0314] Whether a given peptide binds a class I HLA (comprising an HLA heavy chain and a β2M polypeptide), and, when bound to the HLA complex, can effectively present an epitope to a TCR, can be determined by assessing T-cell response to the peptide-HLA complex. T-cell responses that can be measured include, e.g., interferon-gamma (IFNγ) production, cytotoxic activity, and the like.

### ELISPOT Assay

[0315] Suitable assays include, e.g., an enzyme linked immunospot (ELISPOT) assay. In this assay, production of IFNγ by CD8⁺ T cells is measured following with an antigen-presenting cell (APC) that presents a peptide of interest complexed with HLA class I. Antibody to IFNγ is immobilized on wells of a multi-well plate. APCs are added to the wells, and incubated for a period of time with a peptide of interest, such that the peptide binds HLA class I on the surface of the APCs. CD8⁺ T cells specific for the peptide are added to the wells, and the plate is incubated for about 24 hours. The wells are then washed, and any IFNγ bound to the immobilized anti-IFNγ antibody is detected using a detectably labeled anti-IFNγ antibody. A colorimetric assay can be used. For example, the detectably labeled anti-IFNγ antibody can be a biotin-labeled anti-IFNγ antibody, which can be detected using, e.g., streptavidin conjugated to alkaline phosphatase. A BCIP/NBT (5-bromo-4-chloro-3-indolyl phosphate/nitro blue tetrazolium) solution is added, to develop the assay. The presence of IFNγ-secreting T cells is identified by colored spots. Negative controls include APCs not contacted with the peptide. APCs expressing various HLA H chain alleles can be used to determine whether a peptide of interest effectively binds to a HLA class I molecule comprising a particular HLA H chain.

### Cytotoxicity Assays

[0316] Whether a given peptide binds to a particular HLA class I H chain and, when bound to a HLA class I complex comprising the H chain, can effectively present an epitope to a TCR, can also be determined using a cytotoxicity assay. A cytotoxicity assay involves incubation of a target cell with a cytotoxic CD8⁺ T cell. The target cell displays on its surface a peptide/HLA class I complex comprising a peptide of interest and an HLA class I molecule comprising an HLA H chain to be tested. The target cells can be radioactively labeled, e.g., with ⁵¹Cr. Whether the target cell effectively presents an epitope to a TCR on the cytotoxic CD8⁺ T cell, thereby inducing cytotoxic activity by the CD8⁺ T cell toward the target cell, is determined by measuring release of ⁵¹Cr from the lysed target cell. Specific cytotoxicity can be calculated as the amount of cytotoxic activity in the presence of the peptide minus the amount of cytotoxic activity in the absence of the peptide.

Detection of Antigen-Specific T Cells with Peptide-HLA Tetramers

[0317] As another example, multimers (e.g., tetramers) of peptide-HLA complexes are generated with fluorescent or heavy metal tags. The multimers can then be used to identify and quantify specific T cells via flow cytometry (FACS) or mass cytometry (CyTOF). Detection of epitope-specific T cells provides direct evidence that the peptide-bound HLA molecule is capable of binding to a specific TCR on a subset of antigen-specific T cells. See, e.g., Klenerman et al. (2002) Nature Reviews Immunol. 2:263.

### Immunomodulatory Polypeptides

[0318] In some cases, an immunomodulatory polypeptide present in a TMMP of the present disclosure is a wild-type immunomodulatory polypeptide. In other cases, an immunomodulatory polypeptide present in a TMMP of the present disclosure is a variant immunomodulatory polypeptide that has reduced affinity for a co-immunomodulatory polypeptide, compared to the affinity of a corresponding wild-type immunomodulatory polypeptide for the co-immunomodulatory polypeptide. Suitable immunomodulatory domains that exhibit reduced affinity for a co-immunomodulatory domain can have from 1 amino acid (aa) to 20 aa differences from a wild-type immunomodulatory domain. For example, in some cases, a variant immunomodulatory polypeptide present in a TMMP of the present disclosure differs in amino acid sequence by 1 aa, 2 aa, 3 aa, 4 aa, 5 aa, 6 aa, 7 aa, 8 aa, 9 aa, or 10 aa, from a corresponding wild-type immunomodulatory polypeptide. As another example, in some cases, a variant immunomodulatory polypeptide present in a TMMP of the present disclosure differs in amino acid sequence by 11 aa, 12 aa, 13 aa, 14 aa, 15 aa, 16 aa, 17 aa, 18 aa, 19 aa, or 20 aa, from a corresponding wild-type immunomodulatory polypeptide. As an example, in some cases, a variant immunomodulatory polypeptide present in a TMMP of the present disclosure includes 1, 2, 3, 4, 5, 6, 7, 8, 9, or 10 amino acid substitutions, compared to a corresponding reference (e.g., wild-type) immunomodulatory polypeptide. In some cases, variant immunomodulatory polypeptide present in a TMMP of the present disclosure includes a single amino acid substitution compared to a corresponding reference (e.g., wild-type) immunomodulatory polypeptide. In some cases, variant immunomodulatory polypeptide present in a TMMP of the present disclosure includes 2 amino acid substitutions (e.g., no more than 2 amino acid substitutions) compared to a corresponding reference (e.g., wild-type) immunomodulatory polypeptide. In some cases, variant immunomodulatory polypeptide present in a TMMP of the present disclosure includes 3 amino acid substitutions (e.g., no more than 3 amino acid substitutions) compared to a corresponding reference (e.g., wild-type) immunomodulatory polypeptide. In some cases, variant immunomodulatory polypeptide present in a TMMP of the present disclosure includes 4 amino acid substitutions (e.g., no more than 4 amino acid substitutions) compared to a corresponding reference (e.g., wild-type) immunomodulatory polypeptide. In some cases, variant immunomodulatory polypeptide present in a TMMP of the present disclosure includes 5 amino acid substitutions (e.g., no more than 5 amino acid substitutions) compared to a corresponding reference (e.g., wild-type) immunomodulatory polypeptide. In some cases, variant immunomodulatory polypeptide present in a TMMP of the present disclosure includes 6 amino acid substitutions (e.g., no more than 6 amino acid substitutions) compared to a corresponding reference (e.g., wild-type) immunomodulatory polypeptide. In some cases, variant immunomodulatory polypeptide present in a TMMP of the present disclosure includes 7 amino acid substitutions (e.g., no more than 7 amino acid substitutions) compared to a corresponding reference (e.g., wild-type) immunomodulatory polypeptide. In some cases, variant immunomodulatory polypeptide present in a TMMP of the present disclosure includes 8 amino acid substitutions (e.g., no more than 8 amino acid substitutions) compared to a corresponding reference (e.g., wild-type) immunomodulatory polypeptide. In some cases, variant immunomodulatory polypeptide present in a TMMP of the present disclosure includes 9 amino acid substitutions (e.g., no more than 9 amino acid substitutions) compared to a corresponding reference (e.g., wild-type) immunomodulatory polypeptide. In some cases, variant immunomodulatory polypeptide present in a TMMP of the present disclosure includes 10 amino acid substitutions (e.g., no more than 10 amino acid substitutions) compared to a corresponding reference (e.g., wild-type) immunomodulatory polypeptide.

[0319] In some cases, variant immunomodulatory polypeptide present in a TMMP of the present disclosure includes 11 amino acid substitutions (e.g., no more than 11 amino acid substitutions) compared to a corresponding reference (e.g., wild-type) immunomodulatory polypeptide.

[0320] In some cases, variant immunomodulatory polypeptide present in a TMMP of the present disclosure includes 12 amino acid substitutions (e.g., no more than 12 amino acid substitutions) compared to a corresponding reference (e.g., wild-type) immunomodulatory polypeptide.

[0321] In some cases, variant immunomodulatory polypeptide present in a TMMP of the present disclosure includes 13 amino acid substitutions (e.g., no more than 13 amino acid substitutions) compared to a corresponding reference (e.g., wild-type) immunomodulatory polypeptide.

[0322] In some cases, variant immunomodulatory polypeptide present in a TMMP of the present disclosure includes 14 amino acid substitutions (e.g., no more than 14 amino acid substitutions) compared to a corresponding reference (e.g., wild-type) immunomodulatory polypeptide.

[0323] In some cases, variant immunomodulatory polypeptide present in a TMMP of the present disclosure includes 15 amino acid substitutions (e.g., no more than 15 amino acid substitutions) compared to a corresponding reference (e.g., wild-type) immunomodulatory polypeptide.

[0324] In some cases, variant immunomodulatory polypeptide present in a TMMP of the present disclosure includes 16 amino acid substitutions (e.g., no more than 16 amino acid substitutions) compared to a corresponding reference (e.g., wild-type) immunomodulatory polypeptide.

[0325] In some cases, variant immunomodulatory polypeptide present in a TMMP of the present disclosure includes 17 amino acid substitutions (e.g., no more than 17 amino acid substitutions) compared to a corresponding reference (e.g., wild-type) immunomodulatory polypeptide.

[0326] In some cases, variant immunomodulatory polypeptide present in a TMMP of the present disclosure includes 18 amino acid substitutions (e.g., no more than 18 amino acid substitutions) compared to a corresponding reference (e.g., wild-type) immunomodulatory polypeptide.

[0327] In some cases, variant immunomodulatory polypeptide present in a TMMP of the present disclosure includes 19 amino acid substitutions (e.g., no more than 19 amino acid substitutions) compared to a corresponding reference (e.g., wild-type) immunomodulatory polypeptide.

[0328] In some cases, variant immunomodulatory polypeptide present in a TMMP of the present disclosure includes 20 amino acid substitutions (e.g., no more than 20 amino acid substitutions) compared to a corresponding reference (e.g., wild-type) immunomodulatory polypeptide.

[0329] As discussed above, a variant immunomodulatory polypeptide suitable for inclusion in a TMMP of the present disclosure exhibits reduced affinity for a cognate co-immunomodulatory polypeptide, compared to the affinity of a corresponding wild-type immunomodulatory polypeptide for the cognate co-immunomodulatory polypeptide.

[0330] Exemplary pairs of immunomodulatory polypeptide and cognate co-immunomodulatory polypeptide include, but are not limited to:

[0331] a) 4-1BBL (immunomodulatory polypeptide) and 4-1BB (cognate co-immunomodulatory polypeptide);

[0332] b) PD-L1 (immunomodulatory polypeptide) and PD1 (cognate co-immunomodulatory polypeptide);

[0333] c) IL-2 (immunomodulatory polypeptide) and IL-2 receptor (cognate co-immunomodulatory polypeptide);

[0334] d) CD80 (immunomodulatory polypeptide) and CD86 (cognate co-immunomodulatory polypeptide);

[0335] e) CD86 (immunomodulatory polypeptide) and CD28 (cognate co-immunomodulatory polypeptide);

[0336] f) OX40L (CD252) (immunomodulatory polypeptide) and OX40 (CD134) (cognate co-immunomodulatory polypeptide);

[0337] g) Fas ligand (immunomodulatory polypeptide) and Fas (cognate co-immunomodulatory polypeptide);

[0338] h) ICOS-L (immunomodulatory polypeptide) and ICOS (cognate co-immunomodulatory polypeptide);

[0339] i) ICAM (immunomodulatory polypeptide) and LFA-1 (cognate co-immunomodulatory polypeptide);

[0340] j) CD30L (immunomodulatory polypeptide) and CD30 (cognate co-immunomodulatory polypeptide);

[0341] k) CD40 (immunomodulatory polypeptide) and CD40L (cognate co-immunomodulatory polypeptide);

[0342] l) CD83 (immunomodulatory polypeptide) and CD83L (cognate co-immunomodulatory polypeptide);

[0343] m) HVEM (CD270) (immunomodulatory polypeptide) and CD160 (cognate co-immunomodulatory polypeptide);

[0344] n) JAG1 (CD339) (immunomodulatory polypeptide) and Notch (cognate co-immunomodulatory polypeptide);

[0345] o) JAG1 (immunomodulatory polypeptide) and CD46 (cognate co-immunomodulatory polypeptide);

[0346] p) CD80 (immunomodulatory polypeptide) and CTLA4 (cognate co-immunomodulatory polypeptide);

[0347] q) CD86 (immunomodulatory polypeptide) and CTLA4 (cognate co-immunomodulatory polypeptide); and

[0348] r) CD70 (immunomodulatory polypeptide) and CD27 (cognate co-immunomodulatory polypeptide).

[0349] In some cases, a variant immunomodulatory polypeptide present in a TMMP of the present disclosure has a binding affinity for a cognate co-immunomodulatory polypeptide that is from 100 nM to 100 μM. For example, in some cases, a variant immunomodulatory polypeptide present in a TMMP of the present disclosure has a binding affinity for a cognate co-immunomodulatory polypeptide that is from about 100 nM to 150 nM, from about 150 nM to about 200 nM, from about 200 nM to about 250 nM, from about 250 nM to about 300 nM, from about 300 nM to about 350 nM, from about 350 nM to about 400 nM, from about 400 nM to about 500 nM, from about 500 nM to about 600 nM, from about 600 nM to about 700 nM, from about 700 nM to about 800 nM, from about 800 nM to about 900 nM, from about 900 nM to about 1 μM, to about 1 μM to about 5 μM, from about 5 μM to about 10 μM, from about 10 μM to about 15 μM, from about 15 μM to about 20 μM, from about 20 μM to about 25 μM, from about M to about 50 μM, from about 50 μM to about 75 μM, or from about 75 μM to about 100 μM.

[0350] A variant immunomodulatory polypeptide present in a TMMP of the present disclosure exhibits reduced affinity for a cognate co-immunomodulatory polypeptide. Similarly, a TMMP of the present disclosure that comprises a variant immunomodulatory polypeptide exhibits reduced affinity for a cognate co-immunomodulatory polypeptide. Thus, for example, a TMMP of the present disclosure that comprises a variant immunomodulatory polypeptide has a binding affinity for a cognate co-immunomodulatory polypeptide that is from 100 nM to 100 μM. For example, in some cases, a TMMP of the present disclosure that comprises a variant immunomodulatory polypeptide has a binding affinity for a cognate co-immunomodulatory polypeptide that is from about 100 nM to 150 nM, from about 150 nM to about 200 nM, from about 200 nM to about 250 nM, from about 250 nM to about 300 nM, from about 300 nM to about 350 nM, from about 350 nM to about 400 nM, from about 400 nM to about 500 nM, from about 500 nM to about 600 nM, from about 600 nM to about 700 nM, from about 700 nM to about 800 nM, from about 800 nM to about 900 nM, from about 900 nM to about 1 μM, to about 1 μM to about 5 μM, from about 5 μM to about 10 μM, from about 10 μM to about 15 μM, from about 15 μM to about 20 μM, from about 20 μM to about 25 μM, from about 25 μM to about 50 μM, from about 50 μM to about 75 μM, or from about 75 μM to about 100 μM.

[0351] As depicted schematically in FIG. 16, an immunomodulatory polypeptide (i.e., one or more immunomodulatory polypeptides) can be present in a TMMP of the present disclosure at any of a variety of positions. FIG. 16 depicts the position of two copies of a variant IL-2 polypeptide; however, the immunomodulatory polypeptide can be any of a variety of immunomodulatory polypeptides, as described herein. As depicted in FIG. 16, an immunomodulatory polypeptide can be: 1) N-terminal to the MHC class I heavy chain; 2) C-terminal to the MHC class I heavy chain and N-terminal to the Ig Fc polypeptide; in other words, between the MHC class I heavy chain and the Ig Fc polypeptide; 3) C-terminal to the Ig Fc polypeptide; 4) N-terminal to the peptide epitope; or 5) C-terminal to the β2M polypeptide.

### PD-L1 Variants

[0352] As one non-limiting example, in some cases, a variant immunomodulatory polypeptide present in a TMMP of the present disclosure is a variant PD-L1 polypeptide. Wild-type PD-L1 binds to PD1.

[0353] A wild-type human PD-L1 polypeptide can comprise the following amino acid sequence:

(SEQ ID NO: 1)
MRIFAVFIFM TYWHLLNAFT VTVPKDLYVV EYGSNMTIEC
KFPVEKQLDL AALIVYWEME DKNIIQFVHG EEDLKVQHSS
YRQRARLLKD QLSLGNAALQ ITDVKLQDAG VYRCMISYGG
ADYKRITVKV NAPYNKINQR ILVVDPVTSE HELTCQAEGY
PKAEVIWTSS DHQVLSGKTT TTNSKREEKL FNVTSTLRIN
TTTNEIFYCT FRRLDPEENH TAELVIPGNI LNVSIKICLT
LSPST.

[0354] A wild-type human PD-L1 ectodomain can comprise the following amino acid sequence:

(SEQ ID NO: 2)
FT VTVPKDLYVV EYGSNMTIEC KFPVEKQLDL AALIVYWEME
DKNIIQFVHG EEDLKVQHSS YRQRARLLKD QLSLGNAALQ
ITDVKLQDAG VYRCMISYGG ADYKRITVKV NAPYNKINQR
ILVVDPVTSE HELTCQAEGY PKAEVIWTSS DHQVLSGKTT
TTNSKREEKL FNVTSTLRIN TTTNEIFYCT FRRLDPEENH
TAELVIPGNI LNVSIKI.

[0355] A wild-type PD-1 polypeptide can comprise the following amino acid sequence: PGWFLDSPDR PWNPPTFSPA LLVVTEGDNA TFTCSFSNTS ESFVLNWYRM SPSNQTDKLA AFPEDRSQPG QDCRFRVTQL PNGRDFHMSV VRARRNDSGT YLCGAISLAP KAQIKESLRA ELRVTERRAE VPTAHPSPSP RPAGQFQTLV VGVVGGLLGS LVLLVWVLAV ICSRAARGTI GARRTGQPLK EDPSAVPVFS VDYGELDFQW REKTPEPPVP CVPEQTEYAT IVFPSGMGTS SPARRGSADG PRSAQPLRPE DGHCSWPL (SEQ ID NO:3). In some cases, where a TMMP of the present disclosure comprises a variant PD-L1 polypeptide, a “cognate co-immunomodulatory polypeptide” is a PD-1 polypeptide comprising the amino acid sequence of SEQ ID NO:3.

[0356] In some cases, a variant PD-L1 polypeptide exhibits reduced binding affinity to PD-1 (e.g., a PD-1 polypeptide comprising the amino acid sequence set forth in SEQ ID NO:3), compared to the binding affinity of a PD-L1 polypeptide comprising the amino acid sequence set forth in SEQ ID NO:1 or SEQ ID NO:2. For example, in some cases, a variant PD-L1 polypeptide of the present disclosure binds PD-1 (e.g., a PD-1 polypeptide comprising the amino acid sequence set forth in SEQ ID NO:3) with a binding affinity that is at least 10%, at least 15%, at least 20%, at least 25%, at least 30%, at least 35%, at least 40%, at least 45%, at least 50% less, at least 55% less, at least 60% less, at least 65% less, at least 70% less, at least 75% less, at least 80% less, at least 85% less, at least 90% less, at least 95% less, or more than 95% less, than the binding affinity of a PD-L1 polypeptide comprising the amino acid sequence set forth in SEQ ID NO:1 or SEQ ID NO:2.

[0357] In some cases, a variant PD-L1 polypeptide has a binding affinity to PD-1 that is from 1 nM to 1 mM. In some cases, a variant PD-L1 polypeptide of the present disclosure has a binding affinity to PD-1 that is from 100 nM to 100 μM. As another example, in some cases, a variant PD-L1 polypeptide has a binding affinity for PD1 (e.g., a PD1 polypeptide comprising the amino acid sequence set forth in SEQ ID NO:3) that is from about 100 nM to 150 nM, from about 150 nM to about 200 nM, from about 200 nM to about 250 nM, from about 250 nM to about 300 nM, from about 300 nM to about 350 nM, from about 350 nM to about 400 nM, from about 400 nM to about 500 nM, from about 500 nM to about 600 nM, from about 600 nM to about 700 nM, from about 700 nM to about 800 nM, from about 800 nM to about 900 nM, from about 900 nM to about 1 μM, to about 1 μM to about 5 μM, from about 5 μM to about 10 μM, from about 10 μM to about 15 μM, from about 15 μM to about 20 μM, from about 20 μM to about 25 μM, from about 25 μM to about 50 μM, from about 50 μM to about 75 μM, or from about 75 μM to about 100 μM.

[0358] In some cases, a variant PD-L1 polypeptide has a single amino acid substitution compared to the PD-L1 amino acid sequence set forth in SEQ ID NO:1 or SEQ ID NO:2. In some cases, a variant PD-L1 polypeptide has from 2 to 10 amino acid substitutions compared to the PD-L1 amino acid sequence set forth in SEQ ID NO:1 or SEQ ID NO:2. In some cases, a variant PD-L1 polypeptide has 2 amino acid substitutions compared to the PD-L1 amino acid sequence set forth in SEQ ID NO:1 or SEQ ID NO:2. In some cases, a variant PD-L1 polypeptide has 3 amino acid substitutions compared to the PD-L1 amino acid sequence set forth in SEQ ID NO:1 or SEQ ID NO:2. In some cases, a variant PD-L1 polypeptide has 4 amino acid substitutions compared to the PD-L1 amino acid sequence set forth in SEQ ID NO:1 or SEQ ID NO:2. In some cases, a variant PD-L1 polypeptide has 5 amino acid substitutions compared to the PD-L1 amino acid sequence set forth in SEQ ID NO:1 or SEQ ID NO:2. In some cases, a variant PD-L1 polypeptide has 6 amino acid substitutions compared to the PD-L1 amino acid sequence set forth in SEQ ID NO:1 or SEQ ID NO:2. In some cases, a variant PD-L1 polypeptide has 7 amino acid substitutions compared to the PD-L1 amino acid sequence set forth in SEQ ID NO:1 or SEQ ID NO:2. In some cases, a variant PD-L1 polypeptide has 8 amino acid substitutions compared to the PD-L1 amino acid sequence set forth in SEQ ID NO:1 or SEQ ID NO:2. In some cases, a variant PD-L1 polypeptide has 9 amino acid substitutions compared to the PD-L1 amino acid sequence set forth in SEQ ID NO:1 or SEQ ID NO:2. In some cases, a variant PD-L1 polypeptide has 10 amino acid substitutions compared to the PD-L1 amino acid sequence set forth in SEQ ID NO:1 or SEQ ID NO:2.

[0359] A suitable PD-L1 variant includes a polypeptide that comprises an amino acid sequence having at least 90%, at least 95%, at least 98%, at least 99%, or 100%, amino acid sequence identity to the following amino acid sequence:

[0360] FT VTVPKXLYVV EYGSNMTIEC KFPVEKQLDL AALIVYWEME DKNIIQFVHG EEDLKVQHSS YRQRARLLKD QLSLGNAALQ ITDVKLQDAG VYRCMISYGG ADYKRITVKV NAPYNKINQR ILVVDPVTSE HELTCQAEGY PKAEVIWTSS DHQVLSGKTT TTNSKREEKL FNVTSTLRIN TTTNEIFYCT FRRLDPEENH TAELVIPGNI LNVSIKI (SEQ ID NO:398), where X is any amino acid other than Asp. In some cases, X is Ala. In some cases, X is Arg.

[0361] A suitable PD-L1 variant includes a polypeptide that comprises an amino acid sequence having at least 90%, at least 95%, at least 98%, at least 99%, or 100%, amino acid sequence identity to the following amino acid sequence:

[0362] FT VTVPKDLYVV EYGSNMTIEC KFPVEKQLDL AALXVYWEME DKNIIQFVHG EEDLKVQHSS YRQRARLLKD QLSLGNAALQ ITDVKLQDAG VYRCMISYGG ADYKRITVKV NAPYNKINQR ILVVDPVTSE HELTCQAEGY PKAEVIWTSS DHQVLSGKTT TTNSKREEKL FNVTSTLRIN TTTNEIFYCT FRRLDPEENH TAELVIPGNI LNVSIKI (SEQ ID NO:399), where X is any amino acid other than Ile. In some cases, X is Asp.

[0363] A suitable PD-L1 variant includes a polypeptide that comprises an amino acid sequence having at least 90%, at least 95%, at least 98%, at least 99%, or 100%, amino acid sequence identity to the following amino acid sequence:

[0364] FT VTVPKDLYVV EYGSNMTIEC KFPVEKQLDL AALIVYWEME DKNIIQFVHG EXDLKVQHSS YRQRARLLKD QLSLGNAALQ ITDVKLQDAG VYRCMISYGG ADYKRITVKV NAPYNKINQR ILVVDPVTSE HELTCQAEGY PKAEVIWTSS DHQVLSGKTT TTNSKREEKL FNVTSTLRIN TTTNEIFYCT FRRLDPEENH TAELVIPGNI LNVSIKI (SEQ ID NO:400), where X is any amino acid other than Glu. In some cases, X is Arg.

### CD80 Variants

[0365] In some cases, a variant immunomodulatory polypeptide present in a TMMP of the present disclosure is a variant CD80 polypeptide. Wild-type CD80 binds to CD28. Wild-type CD80 also binds to CD86.

[0366] A wild-type amino acid sequence of the ectodomain of human CD80 can be as follows:

(SEQ ID NO: 4)
VIHVTK EVKEVATLSC GHNVSVEELA QTRIYWQKEK
KMVLTMMSGD MNIWPEYKNR TIFDITNNLS IVILALRPSD
EGTYECVVLK YEKDAFKREH LAEVTLSVKA DFPTPSISDF
EIPTSNIRRI ICSTSGGFPE PHLSWLENGE ELNAINTTVS
QDPETELYAV SSKLDFNMTT NHSFMCLIKY GHLRVNQTFN
WNTTKQEHFP DN.

[0367] A wild-type CD28 amino acid sequence can be as follows: MLRLLLALNL FPSIQVTGNK ILVKQSPMLV AYDNAVNLSC KYSYNLFSRE FRASLHKGLD SAVEVCVVYG NYSQQLQVYS KTGFNCDGKL GNESVTFYLQ NLYVNQTDIY FCKIEVMYPP PYLDNEKSNG TIIHVKGKHL CPSPLFPGPS KPFWVLVVVG GVLACYSLLV TVAFIIFWVR SKRSRLLHSD YMNMTPRRPG PTRKHYQPYA PPRDFAAYRS (SEQ ID NO:5). In some cases, where a TMMP of the present disclosure comprises a variant CD80 polypeptide, a “cognate co-immunomodulatory polypeptide” is a CD28 polypeptide comprising the amino acid sequence of SEQ ID NO:5.

[0368] A wild-type CD28 amino acid sequence can be as follows: MLRLLLALNL FPSIQVTGNK ILVKQSPMLV AYDNAVNLSW KHLCPSPLFP GPSKPFWVLV VVGGVLACYS LLVTVAFIIF WVRSKRSRLL HSDYMNMTPR RPGPTRKHYQ PYAPPRDFAA YRS (SEQ ID NO:6)

[0369] A wild-type CD28 amino acid sequence can be as follows: MLRLLLALNL FPSIQVTGKH LCPSPLFPGP SKPFWVLVVV GGVLACYSLL VTVAFIIFWV RSKRSRLLHS DYMNMTPRRP GPTRKHYQPY APPRDFAAYR S (SEQ ID NO:7).

[0370] In some cases, a variant CD80 polypeptide exhibits reduced binding affinity to CD28, compared to the binding affinity of a CD80 polypeptide comprising the amino acid sequence set forth in SEQ ID NO:4 for CD28. For example, in some cases, a variant CD80 polypeptide binds CD28 with a binding affinity that is at least 10%, at least 15%, at least 20%, at least 25%, at least 30%, at least 35%, at least 40%, at least 45%, at least 50% less, at least 55% less, at least 60% less, at least 65% less, at least 70% less, at least 75% less, at least 80% less, at least 85% less, at least 90% less, at least 95% less, or more than 95% less, than the binding affinity of a CD80 polypeptide comprising the amino acid sequence set forth in SEQ ID NO:4 for CD28 (e.g., a CD28 polypeptide comprising the amino acid sequence set forth in one of SEQ ID NO:5, 6, or 7).

[0371] In some cases, a variant CD80 polypeptide has a binding affinity to CD28 that is from 100 nM to 100 μM. As another example, in some cases, a variant CD80 polypeptide of the present disclosure has a binding affinity for CD28 (e.g., a CD28 polypeptide comprising the amino acid sequence set forth in SEQ ID NO:5, SEQ ID NO:6, or SEQ ID NO:7) that is from about 100 nM to 150 nM, from about 150 nM to about 200 nM, from about 200 nM to about 250 nM, from about 250 nM to about 300 nM, from about 300 nM to about 350 nM, from about 350 nM to about 400 nM, from about 400 nM to about 500 nM, from about 500 nM to about 600 nM, from about 600 nM to about 700 nM, from about 700 nM to about 800 nM, from about 800 nM to about 900 nM, from about 900 nM to about 1 μM, to about 1 μM to about 5 μM, from about 5 μM to about 10 μM, from about 10 μM to about 15 μM, from about 15 μM to about 20 μM, from about 20 μM to about 25 μM, from about 25 μM to about 50 μM, from about 50 μM to about 75 μM, or from about 75 μM to about 100 μM.

[0372] In some cases, a variant CD80 polypeptide has a single amino acid substitution compared to the CD80 amino acid sequence set forth in SEQ ID NO:4. In some cases, a variant CD80 polypeptide has from 2 to 10 amino acid substitutions compared to the CD80 amino acid sequence set forth in SEQ ID NO:4. In some cases, a variant CD80 polypeptide has 2 amino acid substitutions compared to the CD80 amino acid sequence set forth in SEQ ID NO:4. In some cases, a variant CD80 polypeptide has 3 amino acid substitutions compared to the CD80 amino acid sequence set forth in SEQ ID NO:4. In some cases, a variant CD80 polypeptide has 4 amino acid substitutions compared to the CD80 amino acid sequence set forth in SEQ ID NO:4. In some cases, a variant CD80 polypeptide has 5 amino acid substitutions compared to the CD80 amino acid sequence set forth in SEQ ID NO:4. In some cases, a variant CD80 polypeptide has 6 amino acid substitutions compared to the CD80 amino acid sequence set forth in SEQ ID NO:4. In some cases, a variant CD80 polypeptide has 7 amino acid substitutions compared to the CD80 amino acid sequence set forth in SEQ ID NO:4. In some cases, a variant CD80 polypeptide has 8 amino acid substitutions compared to the CD80 amino acid sequence set forth in SEQ ID NO:4. In some cases, a variant CD80 polypeptide has 9 amino acid substitutions compared to the CD80 amino acid sequence set forth in SEQ ID NO:4. In some cases, a variant CD80 polypeptide has 10 amino acid substitutions compared to the CD80 amino acid sequence set forth in SEQ ID NO:4.

[0373] Suitable CD80 variants include a polypeptide that comprises an amino acid sequence having at least 90%, at least 95%, at least 98%, at least 99%, or 100%, amino acid sequence identity to any one of the following amino acid sequences:

[0374] VIHVTK EVKEVATLSC GHXVSVEELA QTRIYWQKEK KMVLTMMSGD MNIWPEYKNR TIFDITNNLS IVILALRPSD EGTYECVVLK YEKDAFKREH LAEVTLSVKA DFPTPSISDF EIPTSNIRRI ICSTSGGFPE PHLSWLENGE ELNAINTTVS QDPETELYAV SSKLDFNMTT NHSFMCLIKY GHLRVNQTFN WNTTKQEHFP DN (SEQ ID NO:401), where X is any amino acid other than Asn. In some cases, X is Ala;

[0375] VIHVTK EVKEVATLSC GHNVSVEELA QTRIYWQKEK KMVLTMMSGD MNIWPEYKNR TIFDITXNLS IVILALRPSD EGTYECVVLK YEKDAFKREH LAEVTLSVKA DFPTPSISDF EIPTSNIRRI ICSTSGGFPE PHLSWLENGE ELNAINTTVS QDPETELYAV SSKLDFNMTT NHSFMCLIKY GHLRVNQTFN WNTTKQEHFP DN (SEQ ID NO:402), where X is any amino acid other than Asn. In some cases, X is Ala;

[0376] VIHVTK EVKEVATLSC GHNVSVEELA QTRIYWQKEK KMVLTMMSGD MNIWPEYKNR TIFDITNNLS XVILALRPSD EGTYECVVLK YEKDAFKREH LAEVTLSVKA DFPTPSISDF EIPTSNIRRI ICSTSGGFPE PHLSWLENGE ELNAINTTVS QDPETELYAV SSKLDFNMTT NHSFMCLIKY GHLRVNQTFN WNTTKQEHFP DN (SEQ ID NO:403), where X is any amino acid other than Ile. In some cases, X is Ala;

[0377] VIHVTK EVKEVATLSC GHNVSVEELA QTRIYWQKEK KMVLTMMSGD MNIWPEYKNR TIFDITNNLS IVILALRPSD EGTYECVVLX YEKDAFKREH LAEVTLSVKA DFPTPSISDF EIPTSNIRRI ICSTSGGFPE PHLSWLENGE ELNAINTTVS QDPETELYAV SSKLDFNMTT NHSFMCLIKY GHLRVNQTFN WNTTKQEHFP DN (SEQ ID NO:404), where X is any amino acid other than Lys. In some cases, X is Ala;

[0378] VIHVTK EVKEVATLSC GHNVSVEELA QTRIYWQKEK KMVLTMMSGD MNIWPEYKNR TIFDITNNLS IVILALRPSD EGTYECVVLK YEKDAFKREH LAEVTLSVKA DFPTPSISDF EIPTSNIRRI ICSTSGGFPE PHLSWLENGE ELNAINTTVS XDPETELYAV SSKLDFNMTT NHSFMCLIKY GHLRVNQTFN WNTTKQEHFP DN (SEQ ID NO:405), where X is any amino acid other than Gln. In some cases, X is Ala;

[0379] VIHVTK EVKEVATLSC GHNVSVEELA QTRIYWQKEK KMVLTMMSGD MNIWPEYKNR TIFDITNNLS IVILALRPSD EGTYECVVLK YEKDAFKREH LAEVTLSVKA DFPTPSISDF EIPTSNIRRI ICSTSGGFPE PHLSWLENGE ELNAINTTVS QXPETELYAV SSKLDFNMTT NHSFMCLIKY GHLRVNQTFN WNTTKQEHFP DN (SEQ ID NO:406), where X is any amino acid other than Asp. In some cases, X is Ala;

[0380] VIHVTK EVKEVATLSC GHNVSVEEXA QTRIYWQKEK KMVLTMMSGD MNIWPEYKNR TIFDITNNLS IVILALRPSD EGTYECVVLK YEKDAFKREH LAEVTLSVKA DFPTPSISDF EIPTSNIRRI ICSTSGGFPE PHLSWLENGE ELNAINTTVS QDPETELYAV SSKLDFNMTT NHSFMCLIKY GHLRVNQTFN WNTTKQEHFP DN (SEQ ID NO:407), where X is any amino acid other than Leu. In some cases, X is Ala;

[0381] VIHVTK EVKEVATLSC GHNVSVEELA QTRIXWQKEK KMVLTMMSGD MNIWPEYKNR TIFDITNNLS IVILALRPSD EGTYECVVLK YEKDAFKREH LAEVTLSVKA DFPTPSISDF EIPTSNIRRI ICSTSGGFPE PHLSWLENGE ELNAINTTVS QDPETELYAV SSKLDFNMTT NHSFMCLIKY GHLRVNQTFN WNTTKQEHFP DN (SEQ ID NO:408), where X is any amino acid other than Tyr. In some cases, X is Ala;

[0382] VIHVTK EVKEVATLSC GHNVSVEELA QTRIYWXKEK KMVLTMMSGD MNIWPEYKNR TIFDITNNLS IVILALRPSD EGTYECVVLK YEKDAFKREH LAEVTLSVKA DFPTPSISDF EIPTSNIRRI ICSTSGGFPE PHLSWLENGE ELNAINTTVS QDPETELYAV SSKLDFNMTT NHSFMCLIKY GHLRVNQTFN WNTTKQEHFP DN (SEQ ID NO:409), where X is any amino acid other than Gln. In some cases, X is Ala;

[0383] VIHVTK EVKEVATLSC GHNVSVEELA QTRIYWQKEK KXVLTMMSGD MNIWPEYKNR TIFDITNNLS IVILALRPSD EGTYECVVLK YEKDAFKREH LAEVTLSVKA DFPTPSISDF EIPTSNIRRI ICSTSGGFPE PHLSWLENGE ELNAINTTVS QDPETELYAV SSKLDFNMTT NHSFMCLIKY GHLRVNQTFN WNTTKQEHFP DN (SEQ ID NO:410), where X is any amino acid other than Met. In some cases, X is Ala;

[0384] VIHVTK EVKEVATLSC GHNVSVEELA QTRIYWQKEK KMXLTMMSGD MNIWPEYKNR TIFDITNNLS IVILALRPSD EGTYECVVLK YEKDAFKREH LAEVTLSVKA DFPTPSISDF EIPTSNIRRI ICSTSGGFPE PHLSWLENGE ELNAINTTVS QDPETELYAV SSKLDFNMTT NHSFMCLIKY GHLRVNQTFN WNTTKQEHFP DN (SEQ ID NO:411), where X is any amino acid other than Val. In some cases, X is Ala;

[0385] VIHVTK EVKEVATLSC GHNVSVEELA QTRIYWQKEK KMVLTMMSGD MNXWPEYKNR TIFDITNNLS IVILALRPSD EGTYECVVLK YEKDAFKREH LAEVTLSVKA DFPTPSISDF EIPTSNIRRI ICSTSGGFPE PHLSWLENGE ELNAINTTVS QDPETELYAV SSKLDFNMTT NHSFMCLIKY GHLRVNQTFN WNTTKQEHFP DN (SEQ ID NO:412), where X is any amino acid other than Ile. In some cases, X is Ala;

[0386] VIHVTK EVKEVATLSC GHNVSVEELA QTRIYWQKEK KMVLTMMSGD MNIWPEXKNR TIFDITNNLS IVILALRPSD EGTYECVVLK YEKDAFKREH LAEVTLSVKA DFPTPSISDF EIPTSNIRRI ICSTSGGFPE PHLSWLENGE ELNAINTTVS QDPETELYAV SSKLDFNMTT NHSFMCLIKY GHLRVNQTFN WNTTKQEHFP DN (SEQ ID NO:413), where X is any amino acid other than Tyr. In some cases, X is Ala;

[0387] VIHVTK EVKEVATLSC GHNVSVEELA QTRIYWQKEK KMVLTMMSGD MNIWPEYKNR TIFXITNNLS IVILALRPSD EGTYECVVLK YEKDAFKREH LAEVTLSVKA DFPTPSISDF EIPTSNIRRI ICSTSGGFPE PHLSWLENGE ELNAINTTVS QDPETELYAV SSKLDFNMTT NHSFMCLIKY GHLRVNQTFN WNTTKQEHFP DN (SEQ ID NO:414), where X is any amino acid other than Asp. In some cases, X is Ala;

[0388] VIHVTK EVKEVATLSC GHNVSVEELA QTRIYWQKEK KMVLTMMSGD MNIWPEYKNR TIFDITNNLS IVILALRPSD EGTYECVVLK YEKDAFKREH LAEVTLSVKA DXPTPSISDF EIPTSNIRRI ICSTSGGFPE PHLSWLENGE ELNAINTTVS QDPETELYAV SSKLDFNMTT NHSFMCLIKY GHLRVNQTFN WNTTKQEHFP DN (SEQ ID NO:415), where X is any amino acid other than Phe. In some cases, X is Ala;

[0389] VIHVTK EVKEVATLSC GHNVSVEELA QTRIYWQKEK KMVLTMMSGD MNIWPEYKNR TIFDITNNLS IVILALRPSD EGTYECVVLK YEKDAFKREH LAEVTLSVKA DFPTPSISDF EIPTSNIRRI ICSTSGGFPE PHLSWLENGE ELNAINTTVX QDPETELYAV SSKLDFNMTT NHSFMCLIKY GHLRVNQTFN WNTTKQEHFP DN (SEQ ID NO:416), where X is any amino acid other than Ser. In some cases, X is Ala; and

[0390] VIHVTK EVKEVATLSC GHNVSVEELA QTRIYWQKEK KMVLTMMSGD MNIWPEYKNR TIFDITNNLS IVILALRPSD EGTYECVVLK YEKDAFKREH LAEVTLSVKA DFPTXSISDF EIPTSNIRRI ICSTSGGFPE PHLSWLENGE ELNAINTTVS QDPETELYAV SSKLDFNMTT NHSFMCLIKY GHLRVNQTFN WNTTKQEHFP DN (SEQ ID NO:417), where X is any amino acid other than Pro. In some cases, X is Ala.

### CD86 Variants

[0391] In some cases, a variant immunomodulatory polypeptide present in a TMMP of the present disclosure is a variant CD86 polypeptide. Wild-type CD86 binds to CD28. In some cases, where a TMMP of the present disclosure comprises a variant CD86 polypeptide, a “cognate co-immunomodulatory polypeptide” is a CD28 polypeptide comprising the amino acid sequence of SEQ ID NO:5.

[0392] The amino acid sequence of the full ectodomain of a wild-type human CD86 can be as

(SEQ ID NO: 8)
APLKIQAYFNETADLPCQFANSQNQSLSELVVFWQDQENLVLNEVYLG
KEKFDSVHSKYMNRTSFDSDSWTLRLHNLQIKDKGLYQCIIHHKKPTG
MIRIHQMNSELSVLANFSQPEIVPISNITENVYINLTCSSIHGYPEPK
KMSVLLRTKNSTIEYDGIMQKSQDNVTELYDVSISLSVSFPDVTSNMT
IFCILETDKTRLLSSPFSIELEDPQPPPDHIP.

[0393] The amino acid sequence of the IgV domain of a wild-type human CD86 can be as follows:

(SEQ ID NO: 9)
APLKIQAYFNETADLPCQFANSQNQSLSELVVFWQDQENLVLNEVYLG
KEKFDSVHSKYMNRTSFDSDSWTLRLHNLQIKDKGLYQCIIHHKKPTG
MIRIHQMNSELSVL.

[0394] In some cases, a variant CD86 polypeptide exhibits reduced binding affinity to CD28, compared to the binding affinity of a CD86 polypeptide comprising the amino acid sequence set forth in SEQ ID NO:8 or SEQ ID NO:9 for CD28. For example, in some cases, a variant CD86 polypeptide binds CD28 with a binding affinity that is at least 10%, at least 15%, at least 20%, at least 25%, at least 30%, at least 35%, at least 40%, at least 45%, at least 50% less, at least 55% less, at least 60% less, at least 65% less, at least 70% less, at least 75% less, at least 80% less, at least 85% less, at least 90% less, at least 95% less, or more than 95% less, than the binding affinity of a CD86 polypeptide comprising the amino acid sequence set forth in SEQ ID NO:8 or SEQ ID NO:9 for CD28 (e.g., a CD28 polypeptide comprising the amino acid sequence set forth in one of SEQ ID NO:5, 6, or 7).

[0395] In some cases, a variant CD86 polypeptide has a binding affinity to CD28 that is from 100 nM to 100 μM. As another example, in some cases, a variant CD86 polypeptide of the present disclosure has a binding affinity for CD28 (e.g., a CD28 polypeptide comprising the amino acid sequence set forth in one of SEQ ID NOs:5, 6, or 7) that is from about 100 nM to 150 nM, from about 150 nM to about 200 nM, from about 200 nM to about 250 nM, from about 250 nM to about 300 nM, from about 300 nM to about 350 nM, from about 350 nM to about 400 nM, from about 400 nM to about 500 nM, from about 500 nM to about 600 nM, from about 600 nM to about 700 nM, from about 700 nM to about 800 nM, from about 800 nM to about 900 nM, from about 900 nM to about 1 μM, to about 1 μM to about 5 μM, from about 5 μM to about 10 μM, from about 10 μM to about 15 μM, from about 15 μM to about 20 μM, from about 20 μM to about 25 μM, from about 25 μM to about 50 μM, from about 50 μM to about 75 μM, or from about 75 μM to about 100 μM.

[0396] In some cases, a variant CD86 polypeptide has a single amino acid substitution compared to the CD86 amino acid sequence set forth in SEQ ID NO:8. In some cases, a variant CD86 polypeptide has from 2 to 10 amino acid substitutions compared to the CD86 amino acid sequence set forth in SEQ ID NO:8. In some cases, a variant CD86 polypeptide has 2 amino acid substitutions compared to the CD86 amino acid sequence set forth in SEQ ID NO:8. In some cases, a variant CD86 polypeptide has 3 amino acid substitutions compared to the CD86 amino acid sequence set forth in SEQ ID NO:8. In some cases, a variant CD86 polypeptide has 4 amino acid substitutions compared to the CD86 amino acid sequence set forth in SEQ ID NO:8. In some cases, a variant CD86 polypeptide has 5 amino acid substitutions compared to the CD86 amino acid sequence set forth in SEQ ID NO:8. In some cases, a variant CD86 polypeptide has 6 amino acid substitutions compared to the CD86 amino acid sequence set forth in SEQ ID NO:8. In some cases, a variant CD86 polypeptide has 7 amino acid substitutions compared to the CD86 amino acid sequence set forth in SEQ ID NO:8. In some cases, a variant CD86 polypeptide has 8 amino acid substitutions compared to the CD86 amino acid sequence set forth in SEQ ID NO:8. In some cases, a variant CD86 polypeptide has 9 amino acid substitutions compared to the CD86 amino acid sequence set forth in SEQ ID NO:8. In some cases, a variant CD86 polypeptide has 10 amino acid substitutions compared to the CD86 amino acid sequence set forth in SEQ ID NO:8.

[0397] In some cases, a variant CD86 polypeptide has a single amino acid substitution compared to the CD86 amino acid sequence set forth in SEQ ID NO:9. In some cases, a variant CD86 polypeptide has from 2 to 10 amino acid substitutions compared to the CD86 amino acid sequence set forth in SEQ ID NO:9. In some cases, a variant CD86 polypeptide has 2 amino acid substitutions compared to the CD86 amino acid sequence set forth in SEQ ID NO:9. In some cases, a variant CD86 polypeptide has 3 amino acid substitutions compared to the CD86 amino acid sequence set forth in SEQ ID NO:9. In some cases, a variant CD86 polypeptide has 4 amino acid substitutions compared to the CD86 amino acid sequence set forth in SEQ ID NO:9. In some cases, a variant CD86 polypeptide has 5 amino acid substitutions compared to the CD86 amino acid sequence set forth in SEQ ID NO:9. In some cases, a variant CD86 polypeptide has 6 amino acid substitutions compared to the CD86 amino acid sequence set forth in SEQ ID NO:9. In some cases, a variant CD86 polypeptide has 7 amino acid substitutions compared to the CD86 amino acid sequence set forth in SEQ ID NO:9. In some cases, a variant CD86 polypeptide has 8 amino acid substitutions compared to the CD86 amino acid sequence set forth in SEQ ID NO:9. In some cases, a variant CD86 polypeptide has 9 amino acid substitutions compared to the CD86 amino acid sequence set forth in SEQ ID NO:9. In some cases, a variant CD86 polypeptide has 10 amino acid substitutions compared to the CD86 amino acid sequence set forth in SEQ ID NO:9.

[0398] Suitable CD86 variants include a polypeptide that comprises an amino acid sequence having at least 90%, at least 95%, at least 98%, at least 99%, or 100%, amino acid sequence identity to any one of the following amino acid sequences:

[0399] APLKIQAYFNETADLPCQFANSQNQSLSELVVFWQDQENLVLNEVYLGKEKFDSV HSKYMXRTSFDSDSWTLRLHNLQIKDKGLYQCIIHHKKPTGMIRIHQMNSELSVLANFSQPEIVP ISNITENVYINLTCSSIHGYPEPKKMSVLLRTKNSTIEYDGIMQKSQDNVTELYDVSISLSVSFPDV TSNMTIFCILETDKTRLLSSPFSIELEDPQPPPDHIP (SEQ ID NO:418), where X is any amino acid other than Asn. In some cases, X is Ala;

[0400] APLKIQAYFNETADLPCQFANSQNQSLSELVVFWQDQENLVLNEVYLGKEKFDSV HSKYMNRTSFXSDSWTLRLHNLQIKDKGLYQCIIHHKKPTGMIRIHQMNSELSVLANFSQPEIVP ISNITENVYINLTCSSIHGYPEPKKMSVLLRTKNSTIEYDGIMQKSQDNVTELYDVSISLSVSFPDV TSNMTIFCILETDKTRLLSSPFSIELEDPQPPPDHIP (SEQ ID NO:419), where X is any amino acid other than Asp. In some cases, X is Ala;

[0401] APLKIQAYFNETADLPCQFANSQNQSLSELVVFWQDQENLVLNEVYLGKEKFDSV HSKYMNRTSFDSDSXTLRLHNLQIKDKGLYQCIIHHKKPTGMIRIHQMNSELSVLANFSQPEIVPI SNITENVYINLTCSSIHGYPEPKKMSVLLRTKNSTIEYDGIMQKSQDNVTELYDVSISLSVSFPDV TSNMTIFCILETDKTRLLSSPFSIELEDPQPPPDHIP (SEQ ID NO:420), where X is any amino acid other than Trp. In some cases, X is Ala;

[0402] APLKIQAYFNETADLPCQFANSQNQSLSELVVFWQDQENLVLNEVYLGKEKFDSV HSKYMNRTSFDSDSWTLRLHNLQIKDKGLYQCIIHXKKPTGMIRIHQMNSELSVLANFSQPEIVP ISNITENVYINLTCSSIHGYPEPKKMSVLLRTKNSTIEYDGIMQKSQDNVTELYDVSISLSVSFPDV TSNMTIFCILETDKTRLLSSPFSIELEDPQPPPDHIP (SEQ ID NO:421), where X is any amino acid other than His. In some cases, X is Ala;

[0403] APLKIQAYFNETADLPCQFANSQNQSLSELVVFWQDQENLVLNEVYLGKEKFDSV HSKYMXRTSFDSDSWTLRLHNLQIKDKGLYQCIIHHKKPTGMIRIHQMNSELSVL (SEQ ID NO:422), where X is any amino acid other than Asn. In some cases, X is Ala;

[0404] APLKIQAYFNETADLPCQFANSQNQSLSELVVFWQDQENLVLNEVYLGKEKFDSV HSKYMNRTSFXSDSWTLRLHNLQIKDKGLYQCIIHHKKPTGMIRIHQMNSELSVL (SEQ ID NO:423), where X is any amino acid other than Asp. In some cases, X is Ala;

[0405] APLKIQAYFNETADLPCQFANSQNQSLSELVVFWQDQENLVLNEVYLGKEKFDSV HSKYMNRTSFDSDSXTLRLHNLQIKDKGLYQCIIHHKKPTGMIRIHQMNSELSVL (SEQ ID NO:424), where X is any amino acid other than Trp. In some cases, X is Ala;

[0406] APLKIQAYFNETADLPCQFANSQNQSLSELVVFWQDQENLVLNEVYLGKEKFDSV HSKYMNRTSFDSDSWTLRLHNLQIKDKGLYQCIIHXKKPTGMIRIHQMNSELSVL (SEQ ID NO:425), where X is any amino acid other than His. In some cases, X is Ala;

[0407] APLKIQAYFNETADLPCQFANSQNQSLSELVVFWQDQENLXLNEVYLGKEKFDSV HSKYMNRTSFDSDSWTLRLHNLQIKDKGLYQCIIHHKKPTGMIRIHQMNSELSVLANFSQPEIVP ISNITENVYINLTCSSIHGYPEPKKMSVLLRTKNSTIEYDGIMQKSQDNVTELYDVSISLSVSFPDV TSNMTIFCILETDKTRLLSSPFSIELEDPQPPPDHIP (SEQ ID NO:426), where X is any amino acid other than Val. In some cases, X is Ala;

[0408] APLKIQAYFNETADLPCQFANSQNQSLSELVVFWQDQENLXLNEVYLGKEKFDSV HSKYMNRTSFDSDSWTLRLHNLQIKDKGLYQCIIHHKKPTGMIRIHQMNSELSVL (SEQ ID NO:427), where X is any amino acid other than Val. In some cases, X is Ala;

[0409] APLKIQAYFNETADLPCQFANSQNQSLSELVVFWXDQENLVLNEVYLGKEKFDSV HSKYMNRTSFDSDSWTLRLHNLQIKDKGLYQCIIHHKKPTGMIRIHQMNSELSVLANFSQPEIVP ISNITENVYINLTCSSIHGYPEPKKMSVLLRTKNSTIEYDGIMQKSQDNVTELYDVSISLSVSFPDV TSNMTIFCILETDKTRLLSSPFSIELEDPQPPPDHIP (SEQ ID NO:428), where X is any amino acid other than Gln. In some cases, X is Ala;

[0410] APLKIQAYFNETADLPCQFANSQNQSLSELVVFWXDQENLVLNEVYLGKEKFDSV HSKYMNRTSFDSDSWTLRLHNLQIKDKGLYQCIIHHKKPTGMIRIHQMNSELSVL (SEQ ID NO:429), where X is any amino acid other than Gln. In some cases, X is Ala;

[0411] APLKIQAYFNETADLPCQFANSQNQSLSELVVXWQDQENLVLNEVYLGKEKFDS VHSKYMNRTSFDSDSWTLRLHNLQIKDKGLYQCIIHHKKPTGMIRIHQMNSELSVLANFSQPEIV PISNITENVYINLTCSSIHGYPEPKKMSVLLRTKNSTIEYDGIMQKSQDNVTELYDVSISLSVSFPD VTSNMTIFCILETDKTRLLSSPFSIELEDPQPPPDHIP (SEQ ID NO:430), where X is any amino acid other than Phe. In some cases, X is Ala;

[0412] APLKIQAYFNETADLPCQFANSQNQSLSELVVXWQDQENLVLNEVYLGKEKFDS VHSKYMNRTSFDSDSWTLRLHNLQIKDKGLYQCIIHHKKPTGMIRIHQMNSELSVL (SEQ ID NO:431), where X is any amino acid other than Phe. In some cases, X is Ala;

[0413] APLKIQAYFNETADLPCQFANSQNQSLSELVVFWQDQENLVLNEVYLGKEKFDSV HSKYMNRTSFDSDSWTXRLHNLQIKDKGLYQCIIHHKKPTGMIRIHQMNSELSVLANFSQPEIVP ISNITENVYINLTCSSIHGYPEPKKMSVLLRTKNSTIEYDGIMQKSQDNVTELYDVSISLSVSFPDV TSNMTIFCILETDKTRLLSSPFSIELEDPQPPPDHIP (SEQ ID NO:432), where X is any amino acid other than Leu. In some cases, X is Ala;

[0414] APLKIQAYFNETADLPCQFANSQNQSLSELVVFWQDQENLVLNEVYLGKEKFDSV HSKYMNRTSFDSDSWTXRLHNLQIKDKGLYQCIIHHKKPTGMIRIHQMNSELSVL (SEQ ID NO:433), where X is any amino acid other than Leu. In some cases, X is Ala;

[0415] APLKIQAYFNETADLPCQFANSQNQSLSELVVFWQDQENLVLNEVYLGKEKFDSV HSKXMNRTSFDSDSWTLRLHNLQIKDKGLYQCIIHHKKPTGMIRIHQMNSELSVLANFSQPEIVP ISNITENVYINLTCSSIHGYPEPKKMSVLLRTKNSTIEYDGIMQKSQDNVTELYDVSISLSVSFPDV TSNMTIFCILETDKTRLLSSPFSIELEDPQPPPDHIP (SEQ ID NO:434), where X is any amino acid other than Tyr. In some cases, X is Ala;

[0416] APLKIQAYFNETADLPCQFANSQNQSLSELVVFWQDQENLVLNEVYLGKEKFDSV HSKXMNRTSFDSDSWTLRLHNLQIKDKGLYQCIIHHKKPTGMIRIHQMNSELSVL (SEQ ID NO:435), where X is any amino acid other than Tyr. In some cases, X is Ala;

[0417] APLKIQAYFNETADLPCQFANSQNQSLSELVVFWQDQENLVLNEVYLGKEKFDSV HSKYMXRTSFDSDSWTLRLHNLQIKDKGLYQCIIHXKKPTGMIRIHQMNSELSVLANFSQPEIVP ISNITENVYINLTCSSIHGYPEPKKMSVLLRTKNSTIEYDGIMQKSQDNVTELYDVSISLSVSFPDV TSNMTIFCILETDKTRLLSSPFSIELEDPQPPPDHIP (SEQ ID NO:436), where the first X is any amino acid other than Asn and the second X is any amino acid other than His. In some cases, the first and the second X are both Ala;

[0418] APLKIQAYFNETADLPCQFANSQNQSLSELVVFWQDQENLVLNEVYLGKEKFDSV HSKYMXRTSFDSDSWTLRLHNLQIKDKGLYQCIIHXKKPTGMIRIHQMNSELSVL (SEQ ID NO:437), where the first X is any amino acid other than Asn and the second X is any amino acid other than His. In some cases, the first and the second X are both Ala;

[0419] APLKIQAYFNETADLPCQFANSQNQSLSELVVFWQDQENLVLNEVYLGKEKFDSV HSKYMNRTSFX₁SDSWTLRLHNLQIKDKGLYQCIIHX₂KKPTGMIRIHQMNSELSVLANFSQPEIV PISNITENVYINLTCSSIHGYPEPKKMSVLLRTKNSTIEYDGIMQKSQDNVTELYDVSISLSVSFPD VTSNMTIFCILETDKTRLLSSPFSIELEDPQPPPDHIP (SEQ ID NO:438), where X₁ is any amino acid other than Asp, and X₂ is any amino acid other than His. In some cases, X₁ is Ala and X₂ is Ala;

[0420] APLKIQAYFNETADLPCQFANSQNQSLSELVVFWQDQENLVLNEVYLGKEKFDSV HSKYMNRTSFX₁SDSWTLRLHNLQIKDKGLYQCIIHX₂KKPTGMIRIHQMNSELSVL (SEQ ID NO:439), where the first X is any amino acid other than Asn and the second X is any amino acid other than His. In some cases, the first and the second X are both Ala;

[0421] APLKIQAYFNETADLPCQFANSQNQSLSELVVFWQDQENLVLNEVYLGKEKFDSV HSKYMX₁RTSFX₂SDSWTLRLHNLQIKDKGLYQCIIHX₃KKPTGMIRIHQMNSELSVLANFSQPEI VPISNITENVYINLTCSSIHGYPEPKKMSVLLRTKNSTIEYDGIMQKSQDNVTELYDVSISLSVSFP DVTSNMTIFCILETDKTRLLSSPFSIELEDPQPPPDHIP (SEQ ID NO:440), where X1 is any amino acid other than Asn, X₂ is any amino acid other than Asp, and X₃ is any amino acid other than His. In some cases, X1 is Ala, X₂ is Ala, and X₃ is Ala; and

[0422] APLKIQAYFNETADLPCQFANSQNQSLSELVVFWQDQENLVLNEVYLGKEKFDSV HSKYMX₁RTSFX₂SDSWTLRLHNLQIKDKGLYQCIIHX₃KKPTGMIRIHQMNSELSVL (SEQ ID NO:441), where X₁ is any amino acid other than Asn, X₂ is any amino acid other than Asp, and X₃ is any amino acid other than His. In some cases, X₁ is Ala, X₂ is Ala, and X₃ is Ala.

### 4-1BBL Variants

[0423] In some cases, a variant immunomodulatory polypeptide present in a TMMP of the present disclosure is a variant 4-1BBL polypeptide. Wild-type 4-1BBL binds to 4-1BB (CD137).

[0424] A wild-type 4-1BBL amino acid sequence can be as follows:

(SEQ ID NO: 10)
MEYASDASLD PEAPWPPAPR ARACRVLPWA LVAGLLLLLL
LAAACAVFLA CPWAVSGARA SPGSAASPRL REGPELSPDD
PAGLLDLRQG MFAQLVAQNV LLIDGPLSWY SDPGLAGVSL
TGGLSYKEDT KELVVAKAGV YYVFFQLELR RVVAGEGSGS
VSLALHLQPL RSAAGAAALA LTVDLPPASS EARNSAFGFQ
GRLLHLSAGQ RLGVHLHTEA RARHAWQLTQ GATVLGLFRV
TPEIPAGLPS PRSE.

[0425] In some cases, a variant 4-1BBL polypeptide is a variant of the tumor necrosis factor (TNF) homology domain (THD) of human 4-1BBL.

[0426] A wild-type amino acid sequence of the THD of human 4-1BBL can be, e.g., one of SEQ ID NOs:11-13, as follows:

(SEQ ID NO: 11)
PAGLLDLRQG MFAQLVAQNV LLIDGPLSWY SDPGLAGVSL
TGGLSYKEDT KELVVAKAGV YYVFFQLELR RVVAGEGSGS
VSLALHLQPL RSAAGAAALA LTVDLPPASS EARNSAFGFQ
GRLLHLSAGQ RLGVHLHTEA RARHAWQLTQ GATVLGLFRV
TPEIPAGLPS PRSE.
(SEQ ID NO: 12)
D PAGLLDLRQG MFAQLVAQNV LLIDGPLSWY SDPGLAGVSL
TGGLSYKEDT KELVVAKAGV YYVFFQLELR RVVAGEGSGS
VSLALHLQPL RSAAGAAALA LTVDLPPASS EARNSAFGFQ
GRLLHLSAGQ RLGVHLHTEA RARHAWQLTQ GATVLGLFRV
TPEIPAGLPS PRSE.
(SEQ ID NO: 13)
D PAGLLDLRQG MFAQLVAQNV LLIDGPLSWY SDPGLAGVSL
TGGLSYKEDT KELVVAKAGV YYVFFQLELR RVVAGEGSGS
VSLALHLQPL RSAAGAAALA LTVDLPPASS EARNSAFGFQ
GRLLHLSAGQ RLGVHLHTEA RARHAWQLTQ GATVLGLFRV
TPEIPA.

[0427] A wild-type 4-1BB amino acid sequence can be as follows: MGNSCYNIVA TLLLVLNFER TRSLQDPCSN CPAGTFCDNN RNQICSPCPP NSFSSAGGQR TCDICRQCKG VFRTRKECSS TSNAECDCTP GFHCLGAGCS MCEQDCKQGQ ELTKKGCKDC CFGTFNDQKR GICRPWTNCS LDGKSVLVNG TKERDVVCGP SPADLSPGAS SVTPPAPARE PGHSPQIISF FLALTSTALL FLLFFLTLRF SVVKRGRKKL LYIFKQPFMR PVQTTQEEDG CSCRFPEEEE GGCEL (SEQ ID NO:14). In some cases, where a TMMP of the present disclosure comprises a variant 4-1BBL polypeptide, a “cognate co-immunomodulatory polypeptide” is a 4-1BB polypeptide comprising the amino acid sequence of SEQ ID NO:14.

[0428] In some cases, a variant 4-1BBL polypeptide exhibits reduced binding affinity to 4-1BB, compared to the binding affinity of a 4-1BBL polypeptide comprising the amino acid sequence set forth in one of SEQ ID NOs:10-13. For example, in some cases, a variant 4-1BBL polypeptide of the present disclosure binds 4-1BB with a binding affinity that is at least 10% less, at least 15% less, at least 20% less, at least 25%, at least 30% less, at least 35% less, at least 40% less, at least 45% less, at least 50% less, at least 55% less, at least 60% less, at least 65% less, at least 70% less, at least 75% less, at least 80% less, at least 85% less, at least 90% less, at least 95% less, or more than 95% less, than the binding affinity of a 4-1BBL polypeptide comprising the amino acid sequence set forth in one of SEQ ID NOs:10-13 for a 4-1BB polypeptide (e.g., a 4-1BB polypeptide comprising the amino acid sequence set forth in SEQ ID NO:14), when assayed under the same conditions.

[0429] In some cases, a variant 4-1BBL polypeptide has a binding affinity to 4-1BB that is from 100 nM to 100 μM. As another example, in some cases, a variant 4-1BBL polypeptide has a binding affinity for 4-1BB (e.g., a 4-1BB polypeptide comprising the amino acid sequence set forth in SEQ ID NO:14) that is from about 100 nM to 150 nM, from about 150 nM to about 200 nM, from about 200 nM to about 250 nM, from about 250 nM to about 300 nM, from about 300 nM to about 350 nM, from about 350 nM to about 400 nM, from about 400 nM to about 500 nM, from about 500 nM to about 600 nM, from about 600 nM to about 700 nM, from about 700 nM to about 800 nM, from about 800 nM to about 900 nM, from about 900 nM to about 1 μM, to about 1 μM to about 5 μM, from about 5 μM to about 10 μM, from about 10 μM to about 15 μM, from about 15 μM to about 20 μM, from about 20 μM to about M, from about 25 μM to about 50 μM, from about 50 μM to about 75 μM, or from about 75 μM to about 100 μM.

[0430] In some cases, a variant 4-1BBL polypeptide has a single amino acid substitution compared to the 4-1BBL amino acid sequence set forth in one of SEQ ID NOs:10-13. In some cases, a variant 4-1BBL polypeptide has from 2 to 10 amino acid substitutions compared to the 4-1BBL amino acid sequence set forth in one of SEQ ID NOs:10-13. In some cases, a variant 4-1BBL polypeptide has 2 amino acid substitutions compared to the 4-1BBL amino acid sequence set forth in one of SEQ ID NOs:10-13. In some cases, a variant 4-1BBL polypeptide has 3 amino acid substitutions compared to the 4-1BBL amino acid sequence set forth in one of SEQ ID NOs:10-13. In some cases, a variant 4-1BBL polypeptide has 4 amino acid substitutions compared to the 4-1BBL amino acid sequence set forth in one of SEQ ID NOs:10-13. In some cases, a variant 4-1BBL polypeptide has 5 amino acid substitutions compared to the 4-1BBL amino acid sequence set forth in one of SEQ ID NOs:10-13. In some cases, a variant 4-1BBL polypeptide has 6 amino acid substitutions compared to the 4-1BBL amino acid sequence set forth in one of SEQ ID NOs:10-13. In some cases, a variant 4-1BBL polypeptide has 7 amino acid substitutions compared to the 4-1BBL amino acid sequence set forth in one of SEQ ID NOs:10-13. In some cases, a variant 4-1BBL polypeptide has 8 amino acid substitutions compared to the 4-1BBL amino acid sequence set forth in one of SEQ ID NOs:10-13. In some cases, a variant 4-1BBL polypeptide has 9 amino acid substitutions compared to the 4-1BBL amino acid sequence set forth in one of SEQ ID NOs:10-13. In some cases, a variant 4-1BBL polypeptide has 10 amino acid substitutions compared to the 4-1BBL amino acid sequence set forth in one of SEQ ID NOs:10-13.

[0431] Suitable 4-1BBL variants include a polypeptide that comprises an amino acid sequence having at least 90%, at least 95%, at least 98%, at least 99%, or 100%, amino acid sequence identity to any one of the following amino acid sequences:

[0432] PAGLLDLRQG MFAQLVAQNV LLIDGPLSWY SDPGLAGVSL TGGLSYXEDT KELVVAKAGV YYVFFQLELR RVVAGEGSGS VSLALHLQPL RSAAGAAALA LTVDLPPASS EARNSAFGFQ GRLLHLSAGQ RLGVHLHTEA RARHAWQLTQ GATVLGLFRV TPEIPAGLPS PRSE (SEQ ID NO:442), where X is any amino acid other than Lys. In some cases, X is Ala;

[0433] PAGLLDLRQG MFAQLVAQNV LLIDGPLSWY SDPGLAGVSL TGGLSYKEDT KELVVAKAGV YYVFFQLELR RVVAGEGSGS VSLALHLQPL RSAAGAAALA LTVDLPPASS EARNSAFGFQ GRLLHLSAGQ RLGVHLHTEA RARHAWXLTQ GATVLGLFRV TPEIPAGLPS PRSE (SEQ ID NO:443), where X is any amino acid other than Gln. In some cases, X is Ala;

[0434] PAGLLDLRQG XFAQLVAQNV LLIDGPLSWY SDPGLAGVSL TGGLSYKEDT KELVVAKAGV YYVFFQLELR RVVAGEGSGS VSLALHLQPL RSAAGAAALA LTVDLPPASS EARNSAFGFQ GRLLHLSAGQ RLGVHLHTEA RARHAWQLTQ GATVLGLFRV TPEIPAGLPS PRSE (SEQ ID NO:444), where X is any amino acid other than Met. In some cases, X is Ala;

[0435] PAGLLDLRQG MXAQLVAQNV LLIDGPLSWY SDPGLAGVSL TGGLSYKEDT KELVVAKAGV YYVFFQLELR RVVAGEGSGS VSLALHLQPL RSAAGAAALA LTVDLPPASS EARNSAFGFQ GRLLHLSAGQ RLGVHLHTEA RARHAWQLTQ GATVLGLFRV TPEIPAGLPS PRSE (SEQ ID NO:445), where X is any amino acid other than Phe. In some cases, X is Ala;

[0436] PAGLLDLRQG MFAXLVAQNV LLIDGPLSWY SDPGLAGVSL TGGLSYKEDT KELVVAKAGV YYVFFQLELR RVVAGEGSGS VSLALHLQPL RSAAGAAALA LTVDLPPASS EARNSAFGFQ GRLLHLSAGQ RLGVHLHTEA RARHAWQLTQ GATVLGLFRV TPEIPAGLPS PRSE (SEQ ID NO:446), where X is any amino acid other than Gln. In some cases, X is Ala;

[0437] PAGLLDLRQG MFAQXVAQNV LLIDGPLSWY SDPGLAGVSL TGGLSYKEDT KELVVAKAGV YYVFFQLELR RVVAGEGSGS VSLALHLQPL RSAAGAAALA LTVDLPPASS EARNSAFGFQ GRLLHLSAGQ RLGVHLHTEA RARHAWQLTQ GATVLGLFRV TPEIPAGLPS PRSE (SEQ ID NO:447), where X is any amino acid other than Leu. In some cases, X is Ala;

[0438] PAGLLDLRQG MFAQLXAQNV LLIDGPLSWY SDPGLAGVSL TGGLSYKEDT KELVVAKAGV YYVFFQLELR RVVAGEGSGS VSLALHLQPL RSAAGAAALA LTVDLPPASS EARNSAFGFQ GRLLHLSAGQ RLGVHLHTEA RARHAWQLTQ GATVLGLFRV TPEIPAGLPS PRSE (SEQ ID NO:448), where X is any amino acid other than Val. In some cases, X is Ala;

[0439] PAGLLDLRQG MFAQLVAXNV LLIDGPLSWY SDPGLAGVSL TGGLSYKEDT KELVVAKAGV YYVFFQLELR RVVAGEGSGS VSLALHLQPL RSAAGAAALA LTVDLPPASS EARNSAFGFQ GRLLHLSAGQ RLGVHLHTEA RARHAWQLTQ GATVLGLFRV TPEIPAGLPS PRSE (SEQ ID NO:449), where X is any amino acid other than Gln. In some cases, X is Ala;

[0440] PAGLLDLRQG MFAQLVAQXV LLIDGPLSWY SDPGLAGVSL TGGLSYKEDT KELVVAKAGV YYVFFQLELR RVVAGEGSGS VSLALHLQPL RSAAGAAALA LTVDLPPASS EARNSAFGFQ GRLLHLSAGQ RLGVHLHTEA RARHAWQLTQ GATVLGLFRV TPEIPAGLPS PRSE (SEQ ID NO:450), where X is any amino acid other than Asn. In some cases, X is Ala;

[0441] PAGLLDLRQG MFAQLVAQNX LLIDGPLSWY SDPGLAGVSL TGGLSYKEDT KELVVAKAGV YYVFFQLELR RVVAGEGSGS VSLALHLQPL RSAAGAAALA LTVDLPPASS EARNSAFGFQ GRLLHLSAGQ RLGVHLHTEA RARHAWQLTQ GATVLGLFRV TPEIPAGLPS PRSE (SEQ ID NO:451), where X is any amino acid other than Val. In some cases, X is Ala;

[0442] PAGLLDLRQG MFAQLVAQNV XLIDGPLSWY SDPGLAGVSL TGGLSYKEDT KELVVAKAGV YYVFFQLELR RVVAGEGSGS VSLALHLQPL RSAAGAAALA LTVDLPPASS EARNSAFGFQ GRLLHLSAGQ RLGVHLHTEA RARHAWQLTQ GATVLGLFRV TPEIPAGLPS PRSE (SEQ ID NO:452), where X is any amino acid other than Leu. In some cases, X is Ala;

[0443] PAGLLDLRQG MFAQLVAQNV LXIDGPLSWY SDPGLAGVSL TGGLSYKEDT KELVVAKAGV YYVFFQLELR RVVAGEGSGS VSLALHLQPL RSAAGAAALA LTVDLPPASS EARNSAFGFQ GRLLHLSAGQ RLGVHLHTEA RARHAWQLTQ GATVLGLFRV TPEIPAGLPS PRSE (SEQ ID NO:453), where X is any amino acid other than Leu. In some cases, X is Ala;

[0444] PAGLLDLRQG MFAQLVAQNV LLXDGPLSWY SDPGLAGVSL TGGLSYKEDT KELVVAKAGV YYVFFQLELR RVVAGEGSGS VSLALHLQPL RSAAGAAALA LTVDLPPASS EARNSAFGFQ GRLLHLSAGQ RLGVHLHTEA RARHAWQLTQ GATVLGLFRV TPEIPAGLPS PRSE (SEQ ID NO:454), where X is any amino acid other than Ile. In some cases, X is Ala;

[0445] PAGLLDLRQG MFAQLVAQNV LLIXGPLSWY SDPGLAGVSL TGGLSYKEDT KELVVAKAGV YYVFFQLELR RVVAGEGSGS VSLALHLQPL RSAAGAAALA LTVDLPPASS EARNSAFGFQ GRLLHLSAGQ RLGVHLHTEA RARHAWQLTQ GATVLGLFRV TPEIPAGLPS PRSE (SEQ ID NO:455), where X is any amino acid other than Asp. In some cases, X is Ala;

[0446] PAGLLDLRQG MFAQLVAQNV LLIDXPLSWY SDPGLAGVSL TGGLSYKEDT KELVVAKAGV YYVFFQLELR RVVAGEGSGS VSLALHLQPL RSAAGAAALA LTVDLPPASS EARNSAFGFQ GRLLHLSAGQ RLGVHLHTEA RARHAWQLTQ GATVLGLFRV TPEIPAGLPS PRSE (SEQ ID NO:456), where X is any amino acid other than Gly. In some cases, X is Ala;

[0447] PAGLLDLRQG MFAQLVAQNV LLIDGXLSWY SDPGLAGVSL TGGLSYKEDT KELVVAKAGV YYVFFQLELR RVVAGEGSGS VSLALHLQPL RSAAGAAALA LTVDLPPASS EARNSAFGFQ GRLLHLSAGQ RLGVHLHTEA RARHAWQLTQ GATVLGLFRV TPEIPAGLPS PRSE (SEQ ID NO:457), where X is any amino acid other than Pro. In some cases, X is Ala;

[0448] PAGLLDLRQG MFAQLVAQNV LLIDGPXSWY SDPGLAGVSL TGGLSYKEDT KELVVAKAGV YYVFFQLELR RVVAGEGSGS VSLALHLQPL RSAAGAAALA LTVDLPPASS EARNSAFGFQ GRLLHLSAGQ RLGVHLHTEA RARHAWQLTQ GATVLGLFRV TPEIPAGLPS PRSE (SEQ ID NO:458), where X is any amino acid other than Leu. In some cases, X is Ala;

[0449] PAGLLDLRQG MFAQLVAQNV LLIDGPLXWY SDPGLAGVSL TGGLSYKEDT KELVVAKAGV YYVFFQLELR RVVAGEGSGS VSLALHLQPL RSAAGAAALA LTVDLPPASS EARNSAFGFQ GRLLHLSAGQ RLGVHLHTEA RARHAWQLTQ GATVLGLFRV TPEIPAGLPS PRSE (SEQ ID NO:459), where X is any amino acid other than Ser. In some cases, X is Ala;

[0450] PAGLLDLRQG MFAQLVAQNV LLIDGPLSXY SDPGLAGVSL TGGLSYKEDT KELVVAKAGV YYVFFQLELR RVVAGEGSGS VSLALHLQPL RSAAGAAALA LTVDLPPASS EARNSAFGFQ GRLLHLSAGQ RLGVHLHTEA RARHAWQLTQ GATVLGLFRV TPEIPAGLPS PRSE (SEQ ID NO:460), where X is any amino acid other than Trp. In some cases, X is Ala;

[0451] PAGLLDLRQG MFAQLVAQNV LLIDGPLSWX SDPGLAGVSL TGGLSYKEDT KELVVAKAGV YYVFFQLELR RVVAGEGSGS VSLALHLQPL RSAAGAAALA LTVDLPPASS EARNSAFGFQ GRLLHLSAGQ RLGVHLHTEA RARHAWQLTQ GATVLGLFRV TPEIPAGLPS PRSE (SEQ ID NO:461), where X is any amino acid other than Tyr. In some cases, X is Ala;

[0452] PAGLLDLRQG MFAQLVAQNV LLIDGPLSWY XDPGLAGVSL TGGLSYKEDT KELVVAKAGV YYVFFQLELR RVVAGEGSGS VSLALHLQPL RSAAGAAALA LTVDLPPASS EARNSAFGFQ GRLLHLSAGQ RLGVHLHTEA RARHAWQLTQ GATVLGLFRV TPEIPAGLPS PRSE (SEQ ID NO:462), where X is any amino acid other than Ser. In some cases, X is Ala;

[0453] PAGLLDLRQG MFAQLVAQNV LLIDGPLSWY SXPGLAGVSL TGGLSYKEDT KELVVAKAGV YYVFFQLELR RVVAGEGSGS VSLALHLQPL RSAAGAAALA LTVDLPPASS EARNSAFGFQ GRLLHLSAGQ RLGVHLHTEA RARHAWQLTQ GATVLGLFRV TPEIPAGLPS PRSE (SEQ ID NO:463), where X is any amino acid other than Asp. In some cases, X is Ala;

[0454] PAGLLDLRQG MFAQLVAQNV LLIDGPLSWY SDXGLAGVSL TGGLSYKEDT KELVVAKAGV YYVFFQLELR RVVAGEGSGS VSLALHLQPL RSAAGAAALA LTVDLPPASS EARNSAFGFQ GRLLHLSAGQ RLGVHLHTEA RARHAWQLTQ GATVLGLFRV TPEIPAGLPS PRSE (SEQ ID NO:464), where X is any amino acid other than Pro. In some cases, X is Ala;

[0455] PAGLLDLRQG MFAQLVAQNV LLIDGPLSWY SDPXLAGVSL TGGLSYKEDT KELVVAKAGV YYVFFQLELR RVVAGEGSGS VSLALHLQPL RSAAGAAALA LTVDLPPASS EARNSAFGFQ GRLLHLSAGQ RLGVHLHTEA RARHAWQLTQ GATVLGLFRV TPEIPAGLPS PRSE (SEQ ID NO:465), where X is any amino acid other than Gly. In some cases, X is Ala;

[0456] PAGLLDLRQG MFAQLVAQNV LLIDGPLSWY SDPGXAGVSL TGGLSYKEDT KELVVAKAGV YYVFFQLELR RVVAGEGSGS VSLALHLQPL RSAAGAAALA LTVDLPPASS EARNSAFGFQ GRLLHLSAGQ RLGVHLHTEA RARHAWQLTQ GATVLGLFRV TPEIPAGLPS PRSE (SEQ ID NO:466), where X is any amino acid other than Leu. In some cases, X is Ala;

[0457] PAGLLDLRQG MFAQLVAQNV LLIDGPLSWY SDPGLAXVSL TGGLSYKEDT KELVVAKAGV YYVFFQLELR RVVAGEGSGS VSLALHLQPL RSAAGAAALA LTVDLPPASS EARNSAFGFQ GRLLHLSAGQ RLGVHLHTEA RARHAWQLTQ GATVLGLFRV TPEIPAGLPS PRSE (SEQ ID NO:467), where X is any amino acid other than Gly. In some cases, X is Ala;

[0458] PAGLLDLRQG MFAQLVAQNV LLIDGPLSWY SDPGLAGXSL TGGLSYKEDT KELVVAKAGV YYVFFQLELR RVVAGEGSGS VSLALHLQPL RSAAGAAALA LTVDLPPASS EARNSAFGFQ GRLLHLSAGQ RLGVHLHTEA RARHAWQLTQ GATVLGLFRV TPEIPAGLPS PRSE (SEQ ID NO:468), where X is any amino acid other than Val. In some cases, X is Ala;

[0459] PAGLLDLRQG MFAQLVAQNV LLIDGPLSWY SDPGLAGVXL TGGLSYKEDT KELVVAKAGV YYVFFQLELR RVVAGEGSGS VSLALHLQPL RSAAGAAALA LTVDLPPASS EARNSAFGFQ GRLLHLSAGQ RLGVHLHTEA RARHAWQLTQ GATVLGLFRV TPEIPAGLPS PRSE (SEQ ID NO:469), where X is any amino acid other than Ser. In some cases, X is Ala;

[0460] PAGLLDLRQG MFAQLVAQNV LLIDGPLSWY SDPGLAGVSX TGGLSYKEDT KELVVAKAGV YYVFFQLELR RVVAGEGSGS VSLALHLQPL RSAAGAAALA LTVDLPPASS EARNSAFGFQ GRLLHLSAGQ RLGVHLHTEA RARHAWQLTQ GATVLGLFRV TPEIPAGLPS PRSE (SEQ ID NO:470), where X is any amino acid other than Leu. In some cases, X is Ala;

[0461] PAGLLDLRQG MFAQLVAQNV LLIDGPLSWY SDPGLAGVSL XGGLSYKEDT KELVVAKAGV YYVFFQLELR RVVAGEGSGS VSLALHLQPL RSAAGAAALA LTVDLPPASS EARNSAFGFQ GRLLHLSAGQ RLGVHLHTEA RARHAWQLTQ GATVLGLFRV TPEIPAGLPS PRSE (SEQ ID NO:471), where X is any amino acid other than Thr. In some cases, X is Ala;

[0462] PAGLLDLRQG MFAQLVAQNV LLIDGPLSWY SDPGLAGVSL TXGLSYKEDT KELVVAKAGV YYVFFQLELR RVVAGEGSGS VSLALHLQPL RSAAGAAALA LTVDLPPASS EARNSAFGFQ GRLLHLSAGQ RLGVHLHTEA RARHAWQLTQ GATVLGLFRV TPEIPAGLPS PRSE (SEQ ID NO:472), where X is any amino acid other than Gly. In some cases, X is Ala;

[0463] PAGLLDLRQG MFAQLVAQNV LLIDGPLSWY SDPGLAGVSL TGXLSYKEDT KELVVAKAGV YYVFFQLELR RVVAGEGSGS VSLALHLQPL RSAAGAAALA LTVDLPPASS EARNSAFGFQ GRLLHLSAGQ RLGVHLHTEA RARHAWQLTQ GATVLGLFRV TPEIPAGLPS PRSE (SEQ ID NO:473), where X is any amino acid other than Gly. In some cases, X is Ala;

[0464] PAGLLDLRQG MFAQLVAQNV LLIDGPLSWY SDPGLAGVSL TGGXSYKEDT KELVVAKAGV YYVFFQLELR RVVAGEGSGS VSLALHLQPL RSAAGAAALA LTVDLPPASS EARNSAFGFQ GRLLHLSAGQ RLGVHLHTEA RARHAWQLTQ GATVLGLFRV TPEIPAGLPS PRSE (SEQ ID NO:474), where X is any amino acid other than Leu. In some cases, X is Ala;

[0465] PAGLLDLRQG MFAQLVAQNV LLIDGPLSWY SDPGLAGVSL TGGLXYKEDT KELVVAKAGV YYVFFQLELR RVVAGEGSGS VSLALHLQPL RSAAGAAALA LTVDLPPASS EARNSAFGFQ GRLLHLSAGQ RLGVHLHTEA RARHAWQLTQ GATVLGLFRV TPEIPAGLPS PRSE (SEQ ID NO:475), where X is any amino acid other than Ser. In some cases, X is Ala;

[0466] PAGLLDLRQG MFAQLVAQNV LLIDGPLSWY SDPGLAGVSL TGGLSXKEDT KELVVAKAGV YYVFFQLELR RVVAGEGSGS VSLALHLQPL RSAAGAAALA LTVDLPPASS EARNSAFGFQ GRLLHLSAGQ RLGVHLHTEA RARHAWQLTQ GATVLGLFRV TPEIPAGLPS PRSE (SEQ ID NO:476), where X is any amino acid other than Tyr. In some cases, X is Ala;

[0467] PAGLLDLRQG MFAQLVAQNV LLIDGPLSWY SDPGLAGVSL TGGLSYKXDT KELVVAKAGV YYVFFQLELR RVVAGEGSGS VSLALHLQPL RSAAGAAALA LTVDLPPASS EARNSAFGFQ GRLLHLSAGQ RLGVHLHTEA RARHAWQLTQ GATVLGLFRV TPEIPAGLPS PRSE (SEQ ID NO:477), where X is any amino acid other than Glu. In some cases, X is Ala;

[0468] PAGLLDLRQG MFAQLVAQNV LLIDGPLSWY SDPGLAGVSL TGGLSYKEXT KELVVAKAGV YYVFFQLELR RVVAGEGSGS VSLALHLQPL RSAAGAAALA LTVDLPPASS EARNSAFGFQ GRLLHLSAGQ RLGVHLHTEA RARHAWQLTQ GATVLGLFRV TPEIPAGLPS PRSE (SEQ ID NO:478), where X is any amino acid other than Asp. In some cases, X is Ala;

[0469] PAGLLDLRQG MFAQLVAQNV LLIDGPLSWY SDPGLAGVSL TGGLSYKEDX KELVVAKAGV YYVFFQLELR RVVAGEGSGS VSLALHLQPL RSAAGAAALA LTVDLPPASS EARNSAFGFQ GRLLHLSAGQ RLGVHLHTEA RARHAWQLTQ GATVLGLFRV TPEIPAGLPS PRSE (SEQ ID NO:479), where X is any amino acid other than Thr. In some cases, X is Ala;

[0470] PAGLLDLRQG MFAQLVAQNV LLIDGPLSWY SDPGLAGVSL TGGLSYKEDT XELVVAKAGV YYVFFQLELR RVVAGEGSGS VSLALHLQPL RSAAGAAALA LTVDLPPASS EARNSAFGFQ GRLLHLSAGQ RLGVHLHTEA RARHAWQLTQ GATVLGLFRV TPEIPAGLPS PRSE (SEQ ID NO:480), where X is any amino acid other than Lys. In some cases, X is Ala;

[0471] PAGLLDLRQG MFAQLVAQNV LLIDGPLSWY SDPGLAGVSL TGGLSYKEDT KXLVVAKAGV YYVFFQLELR RVVAGEGSGS VSLALHLQPL RSAAGAAALA LTVDLPPASS EARNSAFGFQ GRLLHLSAGQ RLGVHLHTEA RARHAWQLTQ GATVLGLFRV TPEIPAGLPS PRSE (SEQ ID NO:481), where X is any amino acid other than Glu. In some cases, X is Ala;

[0472] PAGLLDLRQG MFAQLVAQNV LLIDGPLSWY SDPGLAGVSL TGGLSYKEDT KELVVAKAGV YYVXFQLELR RVVAGEGSGS VSLALHLQPL RSAAGAAALA LTVDLPPASS EARNSAFGFQ GRLLHLSAGQ RLGVHLHTEA RARHAWQLTQ GATVLGLFRV TPEIPAGLPS PRSE (SEQ ID NO:482), where X is any amino acid other than Phe. In some cases, X is Ala;

[0473] PAGLLDLRQG MFAQLVAQNV LLIDGPLSWY SDPGLAGVSL TGGLSYKEDT KELVVAKAGV YYVFXQLELR RVVAGEGSGS VSLALHLQPL RSAAGAAALA LTVDLPPASS EARNSAFGFQ GRLLHLSAGQ RLGVHLHTEA RARHAWQLTQ GATVLGLFRV TPEIPAGLPS PRSE (SEQ ID NO:483), where X is any amino acid other than Phe. In some cases, X is Ala;

[0474] PAGLLDLRQG MFAQLVAQNV LLIDGPLSWY SDPGLAGVSL TGGLSYKEDT KELVVAKAGV YYVFFXLELR RVVAGEGSGS VSLALHLQPL RSAAGAAALA LTVDLPPASS EARNSAFGFQ GRLLHLSAGQ RLGVHLHTEA RARHAWQLTQ GATVLGLFRV TPEIPAGLPS PRSE (SEQ ID NO:484), where X is any amino acid other than Gln. In some cases, X is Ala;

[0475] PAGLLDLRQG MFAQLVAQNV LLIDGPLSWY SDPGLAGVSL TGGLSYKEDT KELVVAKAGV YYVFFQXELR RVVAGEGSGS VSLALHLQPL RSAAGAAALA LTVDLPPASS EARNSAFGFQ GRLLHLSAGQ RLGVHLHTEA RARHAWQLTQ GATVLGLFRV TPEIPAGLPS PRSE (SEQ ID NO:485), where X is any amino acid other than Leu. In some cases, X is Ala;

[0476] PAGLLDLRQG MFAQLVAQNV LLIDGPLSWY SDPGLAGVSL TGGLSYKEDT KELVVAKAGV YYVFFQLXLR RVVAGEGSGS VSLALHLQPL RSAAGAAALA LTVDLPPASS EARNSAFGFQ GRLLHLSAGQ RLGVHLHTEA RARHAWQLTQ GATVLGLFRV TPEIPAGLPS PRSE (SEQ ID NO:486), where X is any amino acid other than Glu. In some cases, X is Ala;

[0477] PAGLLDLRQG MFAQLVAQNV LLIDGPLSWY SDPGLAGVSL TGGLSYKEDT KELVVAKAGV YYVFFQLEXR RVVAGEGSGS VSLALHLQPL RSAAGAAALA LTVDLPPASS EARNSAFGFQ GRLLHLSAGQ RLGVHLHTEA RARHAWQLTQ GATVLGLFRV TPEIPAGLPS PRSE (SEQ ID NO:487), where X is any amino acid other than Leu. In some cases, X is Ala;

[0478] PAGLLDLRQG MFAQLVAQNV LLIDGPLSWY SDPGLAGVSL TGGLSYKEDT KELVVAKAGV YYVFFQLELX RVVAGEGSGS VSLALHLQPL RSAAGAAALA LTVDLPPASS EARNSAFGFQ GRLLHLSAGQ RLGVHLHTEA RARHAWQLTQ GATVLGLFRV TPEIPAGLPS PRSE (SEQ ID NO:488), where X is any amino acid other than Arg. In some cases, X is Ala;

[0479] PAGLLDLRQG MFAQLVAQNV LLIDGPLSWY SDPGLAGVSL TGGLSYKEDT KELVVAKAGV YYVFFQLELR XVVAGEGSGS VSLALHLQPL RSAAGAAALA LTVDLPPASS EARNSAFGFQ GRLLHLSAGQ RLGVHLHTEA RARHAWQLTQ GATVLGLFRV TPEIPAGLPS PRSE (SEQ ID NO:489), where X is any amino acid other than Arg. In some cases, X is Ala;

[0480] PAGLLDLRQG MFAQLVAQNV LLIDGPLSWY SDPGLAGVSL TGGLSYKEDT KELVVAKAGV YYVFFQLELR RXVAGEGSGS VSLALHLQPL RSAAGAAALA LTVDLPPASS EARNSAFGFQ GRLLHLSAGQ RLGVHLHTEA RARHAWQLTQ GATVLGLFRV TPEIPAGLPS PRSE (SEQ ID NO:490), where X is any amino acid other than Val. In some cases, X is Ala;

[0481] PAGLLDLRQG MFAQLVAQNV LLIDGPLSWY SDPGLAGVSL TGGLSYKEDT KELVVAKAGV YYVFFQLELR RVXAGEGSGS VSLALHLQPL RSAAGAAALA LTVDLPPASS EARNSAFGFQ GRLLHLSAGQ RLGVHLHTEA RARHAWQLTQ GATVLGLFRV TPEIPAGLPS PRSE (SEQ ID NO:491), where X is any amino acid other than Val. In some cases, X is Ala;

[0482] PAGLLDLRQG MFAQLVAQNV LLIDGPLSWY SDPGLAGVSL TGGLSYKEDT KELVVAKAGV YYVFFQLELR RVVAXEGSGS VSLALHLQPL RSAAGAAALA LTVDLPPASS EARNSAFGFQ GRLLHLSAGQ RLGVHLHTEA RARHAWQLTQ GATVLGLFRV TPEIPAGLPS PRSE (SEQ ID NO:492), where X is any amino acid other than Gly. In some cases, X is Ala;

[0483] PAGLLDLRQG MFAQLVAQNV LLIDGPLSWY SDPGLAGVSL TGGLSYKEDT KELVVAKAGV YYVFFQLELR RVVAGXGSGS VSLALHLQPL RSAAGAAALA LTVDLPPASS EARNSAFGFQ GRLLHLSAGQ RLGVHLHTEA RARHAWQLTQ GATVLGLFRV TPEIPAGLPS PRSE (SEQ ID NO:493), where X is any amino acid other than Glu. In some cases, X is Ala;

[0484] PAGLLDLRQG MFAQLVAQNV LLIDGPLSWY SDPGLAGVSL TGGLSYKEDT KELVVAKAGV YYVFFQLELR RVVAGEXSGS VSLALHLQPL RSAAGAAALA LTVDLPPASS EARNSAFGFQ GRLLHLSAGQ RLGVHLHTEA RARHAWQLTQ GATVLGLFRV TPEIPAGLPS PRSE (SEQ ID NO:494), where X is any amino acid other than Gly. In some cases, X is Ala;

[0485] PAGLLDLRQG MFAQLVAQNV LLIDGPLSWY SDPGLAGVSL TGGLSYKEDT KELVVAKAGV YYVFFQLELR RVVAGEGXGS VSLALHLQPL RSAAGAAALA LTVDLPPASS EARNSAFGFQ GRLLHLSAGQ RLGVHLHTEA RARHAWQLTQ GATVLGLFRV TPEIPAGLPS PRSE (SEQ ID NO:495), where X is any amino acid other than Ser. In some cases, X is Ala;

[0486] PAGLLDLRQG MFAQLVAQNV LLIDGPLSWY SDPGLAGVSL TGGLSYKEDT KELVVAKAGV YYVFFQLELR RVVAGEGSGS VSLALHLQPL RSAAGAAALA LTVXLPPASS EARNSAFGFQ GRLLHLSAGQ RLGVHLHTEA RARHAWQLTQ GATVLGLFRV TPEIPAGLPS PRSE (SEQ ID NO:496), where X is any amino acid other than Asp. In some cases, X is Ala;

[0487] PAGLLDLRQG MFAQLVAQNV LLIDGPLSWY SDPGLAGVSL TGGLSYKEDT KELVVAKAGV YYVFFQLELR RVVAGEGSGS VSLALHLQPL RSAAGAAALA LTVDXPPASS EARNSAFGFQ GRLLHLSAGQ RLGVHLHTEA RARHAWQLTQ GATVLGLFRV TPEIPAGLPS PRSE (SEQ ID NO:497), where X is any amino acid other than Leu. In some cases, X is Ala;

[0488] PAGLLDLRQG MFAQLVAQNV LLIDGPLSWY SDPGLAGVSL TGGLSYKEDT KELVVAKAGV YYVFFQLELR RVVAGEGSGS VSLALHLQPL RSAAGAAALA LTVDLXPASS EARNSAFGFQ GRLLHLSAGQ RLGVHLHTEA RARHAWQLTQ GATVLGLFRV TPEIPAGLPS PRSE (SEQ ID NO:498), where X is any amino acid other than Pro. In some cases, X is Ala;

[0489] PAGLLDLRQG MFAQLVAQNV LLIDGPLSWY SDPGLAGVSL TGGLSYKEDT KELVVAKAGV YYVFFQLELR RVVAGEGSGS VSLALHLQPL RSAAGAAALA LTVDLPPAXS EARNSAFGFQ GRLLHLSAGQ RLGVHLHTEA RARHAWQLTQ GATVLGLFRV TPEIPAGLPS PRSE (SEQ ID NO:499), where X is any amino acid other than Ser. In some cases, X is Ala;

[0490] PAGLLDLRQG MFAQLVAQNV LLIDGPLSWY SDPGLAGVSL TGGLSYKEDT KELVVAKAGV YYVFFQLELR RVVAGEGSGS VSLALHLQPL RSAAGAAALA LTVDLPPASX EARNSAFGFQ GRLLHLSAGQ RLGVHLHTEA RARHAWQLTQ GATVLGLFRV TPEIPAGLPS PRSE (SEQ ID NO:500), where X is any amino acid other than Ser. In some cases, X is Ala;

[0491] PAGLLDLRQG MFAQLVAQNV LLIDGPLSWY SDPGLAGVSL TGGLSYKEDT KELVVAKAGV YYVFFQLELR RVVAGEGSGS VSLALHLQPL RSAAGAAALA LTVDLPPASS XARNSAFGFQ GRLLHLSAGQ RLGVHLHTEA RARHAWQLTQ GATVLGLFRV TPEIPAGLPS PRSE (SEQ ID NO:501), where X is any amino acid other than Glu. In some cases, X is Ala;

[0492] PAGLLDLRQG MFAQLVAQNV LLIDGPLSWY SDPGLAGVSL TGGLSYKEDT KELVVAKAGV YYVFFQLELR RVVAGEGSGS VSLALHLQPL RSAAGAAALA LTVDLPPASS EAXNSAFGFQ GRLLHLSAGQ RLGVHLHTEA RARHAWQLTQ GATVLGLFRV TPEIPAGLPS PRSE (SEQ ID NO:502), where X is any amino acid other than Arg. In some cases, X is Ala;

[0493] PAGLLDLRQG MFAQLVAQNV LLIDGPLSWY SDPGLAGVSL TGGLSYKEDT KELVVAKAGV YYVFFQLELR RVVAGEGSGS VSLALHLQPL RSAAGAAALA LTVDLPPASS EARXSAFGFQ GRLLHLSAGQ RLGVHLHTEA RARHAWQLTQ GATVLGLFRV TPEIPAGLPS PRSE (SEQ ID NO:503), where X is any amino acid other than Asn. In some cases, X is Ala;

[0494] PAGLLDLRQG MFAQLVAQNV LLIDGPLSWY SDPGLAGVSL TGGLSYKEDT KELVVAKAGV YYVFFQLELR RVVAGEGSGS VSLALHLQPL RSAAGAAALA LTVDLPPASS EARNXAFGFQ GRLLHLSAGQ RLGVHLHTEA RARHAWQLTQ GATVLGLFRV TPEIPAGLPS PRSE (SEQ ID NO:504), where X is any amino acid other than Ser. In some cases, X is Ala;

[0495] PAGLLDLRQG MFAQLVAQNV LLIDGPLSWY SDPGLAGVSL TGGLSYKEDT KELVVAKAGV YYVFFQLELR RVVAGEGSGS VSLALHLQPL RSAAGAAALA LTVDLPPASS EARNSAXGFQ GRLLHLSAGQ RLGVHLHTEA RARHAWQLTQ GATVLGLFRV TPEIPAGLPS PRSE (SEQ ID NO:505), where X is any amino acid other than Phe. In some cases, X is Ala;

[0496] PAGLLDLRQG MFAQLVAQNV LLIDGPLSWY SDPGLAGVSL TGGLSYKEDT KELVVAKAGV YYVFFQLELR RVVAGEGSGS VSLALHLQPL RSAAGAAALA LTVDLPPASS EARNSAFGFQ GRLLHLSAGX RLGVHLHTEA RARHAWQLTQ GATVLGLFRV TPEIPAGLPS PRSE (SEQ ID NO:506), where X is any amino acid other than Gln. In some cases, X is Ala;

[0497] PAGLLDLRQG MFAQLVAQNV LLIDGPLSWY SDPGLAGVSL TGGLSYKEDT KELVVAKAGV YYVFFQLELR RVVAGEGSGS VSLALHLQPL RSAAGAAALA LTVDLPPASS EARNSAFGFQ GRLLHLSAGQ XLGVHLHTEA RARHAWQLTQ GATVLGLFRV TPEIPAGLPS PRSE (SEQ ID NO:507), where X is any amino acid other than Arg. In some cases, X is Ala;

[0498] PAGLLDLRQG MFAQLVAQNV LLIDGPLSWY SDPGLAGVSL TGGLSYKEDT KELVVAKAGV YYVFFQLELR RVVAGEGSGS VSLALHLQPL RSAAGAAALA LTVDLPPASS EARNSAFGFQ GRLLHLSAGQ RXGVHLHTEA RARHAWQLTQ GATVLGLFRV TPEIPAGLPS PRSE (SEQ ID NO:508), where X is any amino acid other than Leu. In some cases, X is Ala;

[0499] PAGLLDLRQG MFAQLVAQNV LLIDGPLSWY SDPGLAGVSL TGGLSYKEDT KELVVAKAGV YYVFFQLELR RVVAGEGSGS VSLALHLQPL RSAAGAAALA LTVDLPPASS EARNSAFGFQ GRLLHLSAGQ RLXVHLHTEA RARHAWQLTQ GATVLGLFRV TPEIPAGLPS PRSE (SEQ ID NO:509), where X is any amino acid other than Gly. In some cases, X is Ala;

[0500] PAGLLDLRQG MFAQLVAQNV LLIDGPLSWY SDPGLAGVSL TGGLSYKEDT KELVVAKAGV YYVFFQLELR RVVAGEGSGS VSLALHLQPL RSAAGAAALA LTVDLPPASS EARNSAFGFQ GRLLHLSAGQ RLGXHLHTEA RARHAWQLTQ GATVLGLFRV TPEIPAGLPS PRSE (SEQ ID NO:510), where X is any amino acid other than Val. In some cases, X is Ala;

[0501] PAGLLDLRQG MFAQLVAQNV LLIDGPLSWY SDPGLAGVSL TGGLSYKEDT KELVVAKAGV YYVFFQLELR RVVAGEGSGS VSLALHLQPL RSAAGAAALA LTVDLPPASS EARNSAFGFQ GRLLHLSAGQ RLGVXLHTEA RARHAWQLTQ GATVLGLFRV TPEIPAGLPS PRSE (SEQ ID NO:511), where X is any amino acid other than His. In some cases, X is Ala;

[0502] PAGLLDLRQG MFAQLVAQNV LLIDGPLSWY SDPGLAGVSL TGGLSYKEDT KELVVAKAGV YYVFFQLELR RVVAGEGSGS VSLALHLQPL RSAAGAAALA LTVDLPPASS EARNSAFGFQ GRLLHLSAGQ RLGVHXHTEA RARHAWQLTQ GATVLGLFRV TPEIPAGLPS PRSE (SEQ ID NO:512), where X is any amino acid other than Leu. In some cases, X is Ala;

[0503] PAGLLDLRQG MFAQLVAQNV LLIDGPLSWY SDPGLAGVSL TGGLSYKEDT KELVVAKAGV YYVFFQLELR RVVAGEGSGS VSLALHLQPL RSAAGAAALA LTVDLPPASS EARNSAFGFQ GRLLHLSAGQ RLGVHLXTEA RARHAWQLTQ GATVLGLFRV TPEIPAGLPS PRSE (SEQ ID NO:513), where X is any amino acid other than His. In some cases, X is Ala;

[0504] PAGLLDLRQG MFAQLVAQNV LLIDGPLSWY SDPGLAGVSL TGGLSYKEDT KELVVAKAGV YYVFFQLELR RVVAGEGSGS VSLALHLQPL RSAAGAAALA LTVDLPPASS EARNSAFGFQ GRLLHLSAGQ RLGVHLHXEA RARHAWQLTQ GATVLGLFRV TPEIPAGLPS PRSE (SEQ ID NO:514), where X is any amino acid other than Thr. In some cases, X is Ala;

[0505] PAGLLDLRQG MFAQLVAQNV LLIDGPLSWY SDPGLAGVSL TGGLSYKEDT KELVVAKAGV YYVFFQLELR RVVAGEGSGS VSLALHLQPL RSAAGAAALA LTVDLPPASS EARNSAFGFQ GRLLHLSAGQ RLGVHLHTXA RARHAWQLTQ GATVLGLFRV TPEIPAGLPS PRSE (SEQ ID NO:515), where X is any amino acid other than Glu. In some cases, X is Ala;

[0506] PAGLLDLRQG MFAQLVAQNV LLIDGPLSWY SDPGLAGVSL TGGLSYKEDT KELVVAKAGV YYVFFQLELR RVVAGEGSGS VSLALHLQPL RSAAGAAALA LTVDLPPASS EARNSAFGFQ GRLLHLSAGQ RLGVHLHTEA XARHAWQLTQ GATVLGLFRV TPEIPAGLPS PRSE (SEQ ID NO:516), where X is any amino acid other than Arg. In some cases, X is Ala;

[0507] PAGLLDLRQG MFAQLVAQNV LLIDGPLSWY SDPGLAGVSL TGGLSYKEDT KELVVAKAGV YYVFFQLELR RVVAGEGSGS VSLALHLQPL RSAAGAAALA LTVDLPPASS EARNSAFGFQ GRLLHLSAGQ RLGVHLHTEA RAXHAWQLTQ GATVLGLFRV TPEIPAGLPS PRSE (SEQ ID NO:517), where X is any amino acid other than Arg. In some cases, X is Ala;

[0508] PAGLLDLRQG MFAQLVAQNV LLIDGPLSWY SDPGLAGVSL TGGLSYKEDT KELVVAKAGV YYVFFQLELR RVVAGEGSGS VSLALHLQPL RSAAGAAALA LTVDLPPASS EARNSAFGFQ GRLLHLSAGQ RLGVHLHTEA RARXAWQLTQ GATVLGLFRV TPEIPAGLPS PRSE (SEQ ID NO:518), where X is any amino acid other than His. In some cases, X is Ala;

[0509] PAGLLDLRQG MFAQLVAQNV LLIDGPLSWY SDPGLAGVSL TGGLSYKEDT KELVVAKAGV YYVFFQLELR RVVAGEGSGS VSLALHLQPL RSAAGAAALA LTVDLPPASS EARNSAFGFQ GRLLHLSAGQ RLGVHLHTEA RARHAXQLTQ GATVLGLFRV TPEIPAGLPS PRSE (SEQ ID NO:519), where X is any amino acid other than Trp. In some cases, X is Ala;

[0510] PAGLLDLRQG MFAQLVAQNV LLIDGPLSWY SDPGLAGVSL TGGLSYKEDT KELVVAKAGV YYVFFQLELR RVVAGEGSGS VSLALHLQPL RSAAGAAALA LTVDLPPASS EARNSAFGFQ GRLLHLSAGQ RLGVHLHTEA RARHAWQXTQ GATVLGLFRV TPEIPAGLPS PRSE (SEQ ID NO:520), where X is any amino acid other than Leu. In some cases, X is Ala;

[0511] PAGLLDLRQG MFAQLVAQNV LLIDGPLSWY SDPGLAGVSL TGGLSYKEDT KELVVAKAGV YYVFFQLELR RVVAGEGSGS VSLALHLQPL RSAAGAAALA LTVDLPPASS EARNSAFGFQ GRLLHLSAGQ RLGVHLHTEA RARHAWQLXQ GATVLGLFRV TPEIPAGLPS PRSE (SEQ ID NO:521), where X is any amino acid other than Thr. In some cases, X is Ala;

[0512] PAGLLDLRQG MFAQLVAQNV LLIDGPLSWY SDPGLAGVSL TGGLSYKEDT KELVVAKAGV YYVFFQLELR RVVAGEGSGS VSLALHLQPL RSAAGAAALA LTVDLPPASS EARNSAFGFQ GRLLHLSAGQ RLGVHLHTEA RARHAWQLTX GATVLGLFRV TPEIPAGLPS PRSE (SEQ ID NO:522), where X is any amino acid other than Gln. In some cases, X is Ala;

[0513] PAGLLDLRQG MFAQLVAQNV LLIDGPLSWY SDPGLAGVSL TGGLSYKEDT KELVVAKAGV YYVFFQLELR RVVAGEGSGS VSLALHLQPL RSAAGAAALA LTVDLPPASS EARNSAFGFQ GRLLHLSAGQ RLGVHLHTEA RARHAWQLTQ XATVLGLFRV TPEIPAGLPS PRSE (SEQ ID NO:523), where X is any amino acid other than Gly. In some cases, X is Ala;

[0514] PAGLLDLRQG MFAQLVAQNV LLIDGPLSWY SDPGLAGVSL TGGLSYKEDT KELVVAKAGV YYVFFQLELR RVVAGEGSGS VSLALHLQPL RSAAGAAALA LTVDLPPASS EARNSAFGFQ GRLLHLSAGQ RLGVHLHTEA RARHAWQLTQ GAXVLGLFRV TPEIPAGLPS PRSE (SEQ ID NO:524), where X is any amino acid other than Thr. In some cases, X is Ala; and

[0515] PAGLLDLRQG MFAQLVAQNV LLIDGPLSWY SDPGLAGVSL TGGLSYKEDT KELVVAKAGV YYVFFQLELR RVVAGEGSGS VSLALHLQPL RSAAGAAALA LTVDLPPASS EARNSAFGFQ GRLLHLSAGQ RLGVHLHTEA RARHAWQLTQ GATXLGLFRV TPEIPAGLPS PRSE (SEQ ID NO:525), where X is any amino acid other than Val. In some cases, X is Ala.

### IL-2 Variants

[0516] In some cases, a variant immunomodulatory polypeptide present in a TMMP of the present disclosure is a variant IL-2 polypeptide. Wild-type IL-2 binds to IL-2 receptor (IL-2R), i.e., a heterotrimeric polypeptide comprising IL-2Rα, IL-2Rβ, and IL-2Rγ.

[0517] A wild-type IL-2 amino acid sequence can be as follows: APTSSSTKKT QLQLEHLLLD LQMILNGINN YKNPKLTRML TFKFYMPKKA TELKHLQCLEEELKPLEEVL NLAQSKNFHL RPRDLISNIN VIVLELKGSE TTFMCEYADE TATIVEFLNRWITFCOSIIS TLT (SEQ ID NO:15).

[0518] Wild-type IL2 binds to an IL2 receptor (IL2R) on the surface of a cell. An IL2 receptor is in some cases a heterotrimeric polypeptide comprising an alpha chain (IL-2Rα; also referred to as CD25), a beta chain (IL-2Rβ; also referred to as CD122: and a gamma chain (IL-2Rγ; also referred to as CD132). Amino acid sequences of human IL-2Rα, IL2Rβ, and IL-2Rγ can be as follows.

Human IL-2Rα:
(SEQ ID NO: 16)
ELCDDDPPE IPHATFKAMA YKEGTMLNCE CKRGFRRIKS
GSLYMLCTGN SSHSSWDNQC QCTSSATRNT TKQVTPQPEE
QKERKTTEMQ SPMQPVDQAS LPGHCREPPP WENEATERIY
HFVVGQMVYY QCVQGYRALH RGPAESVCKM THGKTRWTQP
QLICTGEMET SQFPGEEKPQ ASPEGRPESE TSCLVTTTDF
QIQTEMAATM ETSIFTTEYQ VAVAGCVFLL ISVLLLSGLT
WQRRQRKSRR TI.
Human IL-2Rβ:
(SEQ ID NO: 17)
VNG TSQFTCFYNS RANISCVWSQ DGALQDTSCQ VHAWPDRRRW
NQTCELLPVS QASWACNLIL GAPDSQKLTT VDIVTLRVLC
REGVRWRVMA IQDFKPFENL RLMAPISLQV VHVETHRCNI
SWEISQASHY FERHLEFEAR TLSPGHTWEE APLLTLKQKQ
EWICLETLTP DTQYEFQVRV KPLQGEFTTW SPWSQPLAFR
TKPAALGKDT IPWLGHLLVG LSGAFGFIIL VYLLINCRNT
GPWLKKVLKC NTPDPSKFFS QLSSEHGGDV QKWLSSPFPS
SSFSPGGLAP EISPLEVLER DKVTQLLLQQ DKVPEPASLS
SNHSLTSCFT NQGYFFFHLP DALEIEACQV YFTYDPYSEE
DPDEGVAGAP TGSSPQPLQP LSGEDDAYCT FPSRDDLLLF
SPSLLGGPSP PSTAPGGSGA GEERMPPSLQ ERVPRDWDPQ
PLGPPTPGVP DLVDFQPPPE LVLREAGEEV PDAGPREGVS
FPWSRPPGQG EFRALNARLP LNTDAYLSLQ ELQGQDPTHL
V.
Human IL-2Rγ:
(SEQ ID NO: 18)
LNTTILTP NGNEDTTADF FLTTMPTDSL SVSTLPLPEV
QCFVFNVEYM NCTWNSSSEP QPTNLTLHYW YKNSDNDKVQ
KCSHYLFSEE ITSGCQLQKK EIHLYQTFVV QLQDPREPRR
QATQMLKLQN LVIPWAPENL TLHKLSESQL ELNWNNRFLN
HCLEHLVQYR TDWDHSWTEQ SVDYRHKFSL PSVDGQKRYT
FRVRSRFNPL CGSAQHWSEW SHPIHWGSNT SKENPFLFAL
EAVVISVGSM GLIISLLCVY FWLERTMPRI PTLKNLEDLV
TEYHGNFSAW SGVSKGLAES LQPDYSERLC LVSEIPPKGG
ALGEGPGASP CNQHSPYWAP PCYTLKPET.

[0519] In some cases, where a TMMP of the present disclosure comprises a variant IL-2 polypeptide, a “cognate co-immunomodulatory polypeptide” is an IL-2R comprising polypeptides comprising the amino acid sequences of SEQ ID NO:16, 17, and 18.

[0520] In some cases, a variant IL-2 polypeptide exhibits reduced binding affinity to IL-2R, compared to the binding affinity of a IL-2 polypeptide comprising the amino acid sequence set forth in SEQ ID NO:15. For example, in some cases, a variant IL-2 polypeptide binds IL-2R with a binding affinity that is at least 10% less, at least 15% less, at least 20% less, at least 25%, at least 30% less, at least 35% less, at least 40% less, at least 45% less, at least 50% less, at least 55% less, at least 60% less, at least 65% less, at least 70% less, at least 75% less, at least 80% less, at least 85% less, at least 90% less, at least 95% less, or more than 95% less, than the binding affinity of an IL-2 polypeptide comprising the amino acid sequence set forth in SEQ ID NO:15 for an IL-2R (e.g., an IL-2R comprising polypeptides comprising the amino acid sequence set forth in SEQ ID NOs:16-18), when assayed under the same conditions.

[0521] In some cases, a variant IL-2 polypeptide has a binding affinity to IL-2R that is from 100 nM to 100 μM. As another example, in some cases, a variant IL-2 polypeptide has a binding affinity for IL-2R (e.g., an IL-2R comprising polypeptides comprising the amino acid sequence set forth in SEQ ID NOs:16-18) that is from about 100 nM to 150 nM, from about 150 nM to about 200 nM, from about 200 nM to about 250 nM, from about 250 nM to about 300 nM, from about 300 nM to about 350 nM, from about 350 nM to about 400 nM, from about 400 nM to about 500 nM, from about 500 nM to about 600 nM, from about 600 nM to about 700 nM, from about 700 nM to about 800 nM, from about 800 nM to about 900 nM, from about 900 nM to about 1 μM, to about 1 μM to about 5 μM, from about 5 μM to about 10 μM, from about 10 μM to about 15 μM, from about 15 μM to about 20 μM, from about 20 μM to about 25 μM, from about 25 μM to about 50 μM, from about 50 μM to about 75 μM, or from about 75 μM to about 100 μM.

[0522] In some cases, a variant IL-2 polypeptide has a single amino acid substitution compared to the IL-2 amino acid sequence set forth in SEQ ID NO:15. In some cases, a variant IL-2 polypeptide has from 2 to 10 amino acid substitutions compared to the IL-2 amino acid sequence set forth in SEQ ID NO:15. In some cases, a variant IL-2 polypeptide has 2 amino acid substitutions compared to the IL-2 amino acid sequence set forth in SEQ ID NO:15. In some cases, a variant IL-2 polypeptide has 3 amino acid substitutions compared to the IL-2 amino acid sequence set forth in SEQ ID NO:15. In some cases, a variant IL-2 polypeptide has 4 amino acid substitutions compared to the IL-2 amino acid sequence set forth in SEQ ID NO:15. In some cases, a variant IL-2 polypeptide has 5 amino acid substitutions compared to the IL-2 amino acid sequence set forth in SEQ ID NO:15. In some cases, a variant IL-2 polypeptide has 6 amino acid substitutions compared to the IL-2 amino acid sequence set forth in SEQ ID NO:15. In some cases, a variant IL-2 polypeptide has 7 amino acid substitutions compared to the IL-2 amino acid sequence set forth in SEQ ID NO:15. In some cases, a variant IL-2 polypeptide has 8 amino acid substitutions compared to the IL-2 amino acid sequence set forth in SEQ ID NO:15. In some cases, a variant IL-2 polypeptide has 9 amino acid substitutions compared to the IL-2 amino acid sequence set forth in SEQ ID NO:15. In some cases, a variant IL-2 polypeptide has 10 amino acid substitutions compared to the IL-2 amino acid sequence set forth in SEQ ID NO:15.

[0523] Suitable IL-2 variants include a polypeptide that comprises an amino acid sequence having at least 90%, at least 95%, at least 98%, at least 99%, or 100%, amino acid sequence identity to any one of the following amino acid sequences:

[0524] APTSSSTKKT QLQLEHLLLD LQMILNGINN YKNPKLTRML TXKFYMPKKA TELKHLQCLE EELKPLEEVL NLAQSKNFHL RPRDLISNIN VIVLELKGSE TTFMCEYADE TATIVEFLNR WITFCQSIIS TLT (SEQ ID NO:527), where X is any amino acid other than Phe. In some cases, X is Ala. In some cases, X is Met. In some cases, X is Pro. In some cases, X is Ser. In some cases, X is Thr. In some cases, X is Trp. In some cases, X is Tyr. In some cases, X is Val. In some cases, X is His;

[0525] APTSSSTKKT QLQLEHLLLX LQMILNGINN YKNPKLTRML TFKFYMPKKA TELKHLQCLE EELKPLEEVL NLAQSKNFHL RPRDLISNIN VIVLELKGSE TTFMCEYADE TATIVEFLNR WITFCQSIIS TLT (SEQ ID NO:528), where X is any amino acid other than Asp. In some cases, X is Ala;

[0526] APTSSSTKKT QLQLXHLLLD LQMILNGINN YKNPKLTRML TFKFYMPKKA TELKHLQCLE EELKPLEEVL NLAQSKNFHL RPRDLISNIN VIVLELKGSE TTFMCEYADE TATIVEFLNR WITFCQSIIS TLT (SEQ ID NO:529), where X is any amino acid other than Glu. In some cases, X is Ala.

[0527] APTSSSTKKT QLQLEXLLLD LQMILNGINN YKNPKLTRML TFKFYMPKKA TELKHLQCLE EELKPLEEVL NLAQSKNFHL RPRDLISNIN VIVLELKGSE TTFMCEYADE TATIVEFLNR WITFCQSIIS TLT (SEQ ID NO:530), where X is any amino acid other than His. In some cases, X is Ala. In some cases, X is Thr. In some cases, X is Asn. In some cases, X is Cys. In some cases, X is Gln. In some cases, X is Met. In some cases, X is Val. In some cases, X is Trp;

[0528] APTSSSTKKT QLQLEXLLLD LQMILNGINN YKNPKLTRML TFKFYMPKKA TELKHLQCLE EELKPLEEVL NLAQSKNFHL RPRDLISNIN VIVLELKGSE TTFMCEYADE TATIVEFLNR WITFCQSIIS TLT (SEQ ID NO:531), where X is any amino acid other than His. In some cases, X is Ala. In some cases, X is Arg. In some cases, X is Asn. In some cases, X is Asp. In some cases, X is Cys. In some cases, X is Glu. In some cases, X is Gln. In some cases, X is Gly. In some cases, X is Ile. In some cases, X is Lys. In some cases, X is Leu. In some cases, X is Met. In some cases, X is Phe. In some cases, X is Pro. In some cases, X is Ser. In some cases, X is Thr. In some cases, X is Tyr. In some cases, X is Trp. In some cases, X is Val;

[0529] APTSSSTKKT QLQLEHLLLD LQMILNGINN YKNPKLTRML TFKFXMPKKA TELKHLQCLE EELKPLEEVL NLAQSKNFHL RPRDLISNIN VIVLELKGSE TTFMCEYADE TATIVEFLNR WITFCQSIIS TLT (SEQ ID NO:532), where X is any amino acid other than Tyr. In some cases, X is Ala;

[0530] APTSSSTKKT QLQLEHLLLD LQMILNGINN YKNPKLTRML TFKFYMPKKA TELKHLQCLE EELKPLEEVL NLAQSKNFHL RPRDLISNIN VIVLELKGSE TTFMCEYADE TATIVEFLNR WITFCXSIIS TLT (SEQ ID NO:533), where X is any amino acid other than Gln. In some cases, X is Ala;

[0531] APTSSSTKKT QLQLEX₁LLLD LQMILNGINN YKNPKLTRML TX₂KFYMPKKA TELKHLQCLE EELKPLEEVL NLAQSKNFHL RPRDLISNIN VIVLELKGSE TTFMCEYADE TATIVEFLNR WITFCQSIIS TLT (SEQ ID NO:534), where X₁ is any amino acid other than His, and where X₂ is any amino acid other than Phe. In some cases, X₁ is Ala. In some cases, X₂ is Ala. In some cases, X₁ is Ala; and X₂ is Ala. In some cases, X₁ is Thr; and X₂ is Ala;

[0532] APTSSSTKKT QLQLEHLLLX₁ LQMILNGINN YKNPKLTRML TX₂KFYMPKKA TELKHLQCLE EELKPLEEVL NLAQSKNFHL RPRDLISNIN VIVLELKGSE TTFMCEYADE TATIVEFLNR WITFCQSIIS TLT (SEQ ID NO:535), where X₁ is any amino acid other than Asp; and where X₂ is any amino acid other than Phe. In some cases, X1 is Ala. In some cases, X₂ is Ala. In some cases, X₁ is Ala; and X₂ is Ala;

[0533] APTSSSTKKT QLQLX₁HLLLX₂ LQMILNGINN YKNPKLTRML TX₃KFYMPKKA TELKHLQCLE EELKPLEEVL NLAQSKNFHL RPRDLISNIN VIVLELKGSE TTFMCEYADE TATIVEFLNR WITFCQSIIS TLT (SEQ ID NO:536), where X₁ is any amino acid other than Glu; where X₂ is any amino acid other than Asp; and where X₃ is any amino acid other than Phe. In some cases, X₁ is Ala. In some cases, X₂ is Ala. In some cases, X₃ is Ala. In some cases, X₁ is Ala; X₂ is Ala; and X₃ is Ala;

[0534] APTSSSTKKT QLQLEX₁LLLX₂ LQMILNGINN YKNPKLTRML TX₃KFYMPKKA TELKHLQCLE EELKPLEEVL NLAQSKNFHL RPRDLISNIN VIVLELKGSE TTFMCEYADE TATIVEFLNR WITFCQSIIS TLT (SEQ ID NO:537), where X₁ is any amino acid other than His; where X₂ is any amino acid other than Asp; and where X₃ is any amino acid other than Phe. In some cases, X₁ is Ala. In some cases, X₂ is Ala. In some cases, X₃ is Ala. In some cases, X₁ is Ala; X₂ is Ala; and X₃ is Ala;

[0535] APTSSSTKKT QLQLEHLLLX₁ LQMILNGINN YKNPKLTRML TX₂KFYMPKKA TELKHLQCLE EELKPLEEVL NLAQSKNFHL RPRDLISNIN VIVLELKGSE TTFMCEYADE TATIVEFLNR WITFCX₃SIIS TLT (SEQ ID NO:538), where X₁ is any amino acid other than Asp; where X₂ is any amino acid other than Phe; and where X₃ is any amino acid other than Gln. In some cases, X₁ is Ala. In some cases, X₂ is Ala. In some cases, X₃ is Ala. In some cases, X₁ is Ala; X₂ is Ala; and X₃ is Ala;

[0536] APTSSSTKKT QLQLEHLLLX₁ LQMILNGINN YKNPKLTRML TX₂KFX₄MPKKA TELKHLQCLE EELKPLEEVL NLAQSKNFHL RPRDLISNIN VIVLELKGSE TTFMCEYADE TATIVEFLNR WITFCQSIIS TLT (SEQ ID NO:539), where X₁ is any amino acid other than Asp; where X₂ is any amino acid other than Phe; and where X₃ is any amino acid other than Tyr. In some cases, X₁ is Ala. In some cases, X₂ is Ala. In some cases, X₃ is Ala. In some cases, X₁ is Ala; X₂ is Ala; and X₃ is Ala;

[0537] APTSSSTKKT QLQLEX₁LLLX₂ LQMILNGINN YKNPKLTRML TX₃KFX₄MPKKA TELKHLQCLE EELKPLEEVL NLAQSKNFHL RPRDLISNIN VIVLELKGSE TTFMCEYADE TATIVEFLNR WITFCQSIIS TLT (SEQ ID NO:540), where X₁ is any amino acid other than His; where X₂ is any amino acid other than Asp; where X₃ is any amino acid other than Phe; and where X₄ is any amino acid other than Tyr. In some cases, X₁ is Ala. In some cases, X₂ is Ala. In some cases, X₃ is Ala. In some cases, X₄ is Ala. In some cases, X₁ is Ala; X₂ is Ala; X₃ is Ala; and X₄ is Ala;

[0538] APTSSSTKKT QLQLEHLLLX₁ LQMILNGINN YKNPKLTRML TX₂KFX₃MPKKA TELKHLQCLE EELKPLEEVL NLAQSKNFHL RPRDLISNIN VIVLELKGSE TTFMCEYADE TATIVEFLNR WITFCX₄SIIS TLT (SEQ ID NO:541), where X₁ is any amino acid other than Asp; where X₂ is any amino acid other than Phe; where X₃ is any amino acid other than Tyr; and where X₄ is any amino acid other than Gln. In some cases, X₁ is Ala. In some cases, X₂ is Ala. In some cases, X₃ is Ala. In some cases, X₄ is Ala. In some cases, X₁ is Ala; X₂ is Ala; X₃ is Ala; and X₄ is Ala;

[0539] APTSSSTKKT QLQLEX₁LLLX₂ LQMILNGINN YKNPKLTRML TX₃KFX₄MPKKA TELKHLQCLE EELKPLEEVL NLAQSKNFHL RPRDLISNIN VIVLELKGSE TTFMCEYADE TATIVEFLNR WITFCX₅SIIS TLT (SEQ ID NO:542), where X₁ is any amino acid other than His; where X₂ is any amino acid other than Asp; where X₃ is any amino acid other than Phe; where X₄ is any amino acid other than Tyr; and where X₅ is any amino acid other than Gln. In some cases, X1 is Ala. In some cases, X₂ is Ala. In some cases, X₃ is Ala. In some cases, X₄ is Ala. In some cases, X₅ is Ala. In some cases, X1 is Ala; X₂ is Ala; X₃ is Ala; X₄ is Ala; X₅ is Ala; and

[0540] APTSSSTKKT QLQLEX₁LLLD LQMILNGINN YKNPKLTRML TX₂KFYMPKKA TELKHLQCLE EELKPLEEVL NLAQSKNFHL RPRDLISNIN VIVLELKGSE TTFMCEYADE TATIVEFLNR WITFCX₃SIIS TLT (SEQ ID NO:543), where X₁ is any amino acid other than His; where X₂ is any amino acid other than Phe; and where X₃ is any amino acid other than Gln. In some cases, X₁ is Ala. In some cases, X₂ is Ala. In some cases, X₃ is Ala. In some cases, X₁ is Ala; X₂ is Ala; and X₃ is Ala.

### Additional Polypeptides

[0541] A polypeptide chain of a TMMP of the present disclosure can include one or more polypeptides in addition to those described above. Suitable additional polypeptides include epitope tags and affinity domains. The one or more additional polypeptide can be included at the N-terminus of a polypeptide chain of a TMMP, at the C-terminus of a polypeptide chain of a TMMP, or internally within a polypeptide chain of a TMMP.

### Epitope Tag

[0542] Suitable epitope tags include, but are not limited to, hemagglutinin (HA; e.g., YPYDVPDYA (SEQ ID NO:544); FLAG (e.g., DYKDDDDK (SEQ ID NO:545); c-myc (e.g., EQKLISEEDL; SEQ ID NO:546), and the like.

### Affinity Domain

[0543] Affinity domains include peptide sequences that can interact with a binding partner, e.g., such as one immobilized on a solid support, useful for identification or purification. DNA sequences encoding multiple consecutive single amino acids, such as histidine, when fused to the expressed protein, may be used for one-step purification of the recombinant protein by high affinity binding to a resin column, such as nickel sepharose. Exemplary affinity domains include His5 (HHHHH) (SEQ ID NO:547), His×6 (HHHHHH) (SEQ ID NO:548), C-myc (EQKLISEEDL) (SEQ ID NO:549), Flag (DYKDDDDK) (SEQ ID NO:550), StrepTag (WSHPQFEK) (SEQ ID NO:551), hemagglutinin, e.g., HA Tag (YPYDVPDYA) (SEQ ID NO:552), glutathione-S-transferase (GST), thioredoxin, cellulose binding domain, RYIRS (SEQ ID NO:553), Phe-His-His-Thr (SEQ ID NO:554), chitin binding domain, S-peptide, T7 peptide, SH2 domain, C-end RNA tag, WEAAAREACCRECCARA (SEQ ID NO:555), metal binding domains, e.g., zinc binding domains or calcium binding domains such as those from calcium-binding proteins, e.g., calmodulin, troponin C, calcineurin B, myosin light chain, recoverin, S-modulin, visinin, VILIP, neurocalcin, hippocalcin, frequenin, caltractin, calpain large-subunit, S100 proteins, parvalbumin, calbindin D9K, calbindin D28K, and calretinin, inteins, biotin, streptavidin, MyoD, Id, leucine zipper sequences, and maltose binding protein.

### Drug Conjugates

[0544] A polypeptide chain of a TMMP of the present disclosure can comprise a small molecule drug linked (e.g., covalently attached) to the polypeptide chain. For example, where a TMMP of the present disclosure comprises an Fc polypeptide, the Fc polypeptide can comprise a covalently linked small molecule drug. In some cases, the small molecule drug is a cancer chemotherapeutic agent, e.g., a cytotoxic agent. A polypeptide chain of a TMMP of the present disclosure can comprise a cytotoxic agent linked (e.g., covalently attached) to the polypeptide chain. For example, where a TMMP of the present disclosure comprises an Fc polypeptide, the Fc polypeptide can comprise a covalently linked cytotoxic agent. Cytotoxic agents include prodrugs.

[0545] A drug (e.g., a cancer chemotherapeutic agent) can be linked directly or indirectly to a polypeptide chain of a TMMP of the present disclosure. For example, where a TMMP of the present disclosure comprises an Fc polypeptide, a drug (e.g., a cancer chemotherapeutic agent) can be linked directly or indirectly to the Fc polypeptide. Direct linkage can involve linkage directly to an amino acid side chain. Indirect linkage can be linkage via a linker. A drug (e.g., a cancer chemotherapeutic agent) can be linked to a polypeptide chain (e.g., an Fc polypeptide) of a TMMP of the present disclosure via a thioether bond, an amide bond, a carbamate bond, a disulfide bond, or an ether bond.

[0546] Linkers include cleavable linkers and non-cleavable linkers. In some cases, the linker is a protease-cleavable linker. Suitable linkers include, e.g., peptides (e.g., from 2 to 10 amino acids in length; e.g., 2, 3, 4, 5, 6, 7, 8, 9, or 10 amino acids in length), alkyl chains, poly(ethylene glycol), disulfide groups, thioether groups, acid labile groups, photolabile groups, peptidase labile groups, and esterase labile groups. Non-limiting example of suitable linkers are: i) N-succinimidyl-[(N-maleimidopropionamido)-tetraethyleneglycol]ester (NHS-PEG4-maleimide); ii) N-succinimidyl 4-(2-pyridyldithio)butanoate (SPDB); N-succinimidyl 4-(2-pyridyldithio)2-sulfobutanoate (sulfo-SPDB); N-succinimidyl 4-(2-pyridyldithio) pentanoate (SPP); N-succinimidyl-4-(N-maleimidomethyl)-cyclohexane-1-carboxy-(6-amidocaproate) (LC-SMCC); κ-maleimidoundecanoic acid N-succinimidyl ester (KMUA); γ-maleimide butyric acid N-succinimidyl ester (GMBS); ε-maleimidocaproic acid N-hydroxysuccinimide ester (EMCS); m-maleimide benzoyl-N-hydroxysuccinimide ester (MBS); N-(α-maleimidoacetoxy)-succinimide ester (AMAS); succinimidyl-6-(β-maleimidopropionamide)hexanoate (SMPH); N-succinimidyl 4-(p-maleimidophenyl)butyrate (SMPB); N-(p-maleimidophenyl)isocyanate (PMPI); N-succinimidyl 4(2-pyridylthio)pentanoate (SPP); N-succinimidyl(4-iodo-acetyl)aminobenzoate (SIAB); 6-maleimidocaproyl (MC); maleimidopropanoyl (MP); p-aminobenzyloxycarbonyl (PAB); N-succinimidyl 4-(maleimidomethyl)cyclohexanecarboxylate (SMCC); N-succinimidyl-4-(N-maleimidomethyl)-cyclohexane-1-carboxy-(6-amidocaproate), a “long chain” analog of SMCC (LC-SMCC); 3-maleimidopropanoic acid N-succinimidyl ester (BMPS); N-succinimidyl iodoacetate (SIA); N-succinimidyl bromoacetate (SBA); and N-succinimidyl 3-(bromoacetamido)propionate (SBAP).

[0547] A polypeptide (e.g., an Fc polypeptide) can be modified with crosslinking reagents such as succinimidyl 4-(N-maleimidomethyl)-cyclohexane-1-carboxylate (SMCC), sulfo-SMCC, maleimidobenzoyl-N-hydroxysuccinimide ester (MBS), sulfo-MBS or succinimidyl-iodoacetate, as described in the literature, to introduce 1-10 reactive groups. The modified Fc polypeptide is then reacted with a thiol-containing cytotoxic agent to produce a conjugate.

[0548] For example, where a TMMP of the present disclosure comprises an Fc polypeptide, the polypeptide chain comprising the Fc polypeptide can be of the formula (A)-(L)-(C), where (A) is the polypeptide chain comprising the Fc polypeptide; where (L), if present, is a linker; and where (C) is a cytotoxic agent. (L), if present, links (A) to (C). In some cases, the polypeptide chain comprising the Fc polypeptide can comprise more than one cytotoxic agent (e.g., 2, 3, 4, or 5, or more than 5, cytotoxic agents).

[0549] Suitable drugs include, e.g., rapamycin. Suitable drugs include, e.g., retinoids, such as all-trans retinoic acid (ATRA); vitamin D3; a vitamin D3 analog; and the like. As noted above, in some cases, a drug is a cytotoxic agent. Cytotoxic agents are known in the art. A suitable cytotoxic agent can be any compound that results in the death of a cell, or induces cell death, or in some manner decreases cell viability, and includes, for example, maytansinoids and maytansinoid analogs, benzodiazepines, taxoids, CC-1065 and CC-1065 analogs, duocarmycins and duocarmycin analogs, enediynes, such as calicheamicins, dolastatin and dolastatin analogs including auristatins, tomaymycin derivatives, leptomycin derivatives, methotrexate, cisplatin, carboplatin, daunorubicin, doxorubicin, vincristine, vinblastine, melphalan, mitomycin C, chlorambucil and morpholino doxorubicin.

[0550] For example, in some cases, the cytotoxic agent is a compound that inhibits microtubule formation in eukaryotic cells. Such agents include, e.g., maytansinoid, benzodiazepine, taxoid, CC-1065, duocarmycin, a duocarmycin analog, calicheamicin, dolastatin, a dolastatin analog, auristatin, tomaymycin, and leptomycin, or a pro-drug of any one of the foregoing. Maytansinoid compounds include, e.g., N(2′)-deacetyl-N(2′)-(3-mercapto-1-oxopropyl)-maytansine (DM1); N(2′)-deacetyl-N(2′)-(4-mercapto-1-oxopentyl)-maytansine (DM3); and N(2′)-deacetyl-N2-(4-mercapto-4-methyl-1-oxopentyl)-maytansine (DM4). Benzodiazepines include, e.g., indolinobenzodiazepines and oxazolidinobenzodiazepines.

[0551] Cytotoxic agents include taxol; cytochalasin B; gramicidin D; ethidium bromide; emetine; mitomycin; etoposide; tenoposide; vincristine; vinblastine; colchicin; doxorubicin; daunorubicin; dihydroxy anthracin dione; maytansine or an analog or derivative thereof; an auristatin or a functional peptide analog or derivative thereof; dolastatin 10 or 15 or an analogue thereof; irinotecan or an analogue thereof; mitoxantrone; mithramycin; actinomycin D; 1-dehydrotestosterone; a glucocorticoid; procaine; tetracaine; lidocaine; propranolol; puromycin; calicheamicin or an analog or derivative thereof; an antimetabolite; 6 mercaptopurine; 6 thioguanine; cytarabine; fludarabin; 5 fluorouracil; decarbazine; hydroxyurea; asparaginase; gemcitabine; cladribine; an alkylating agent; a platinum derivative; duocarmycin A; duocarmycin SA; rachelmycin (CC-1065) or an analog or derivative thereof; an antibiotic; pyrrolo[2,1-c][1,4]-benzodiazepines (PDB); diphtheria toxin; ricin toxin; cholera toxin; a Shiga-like toxin; LT toxin; C3 toxin; Shiga toxin; pertussis toxin; tetanus toxin; soybean Bowman-Birk protease inhibitor; Pseudomonas exotoxin; alorin; saporin; modeccin; gelanin; abrin A chain; modeccin A chain; alpha-sarcin; Aleurites fordii proteins; dianthin proteins; Phytolacca americana proteins; Momordica charantia inhibitor; curcin; crotin; Sapaonaria officinalis inhibitor; gelonin; mitogellin; restrictocin; phenomycin; enomycin toxins; ribonuclease (RNase); DNase I; Staphylococcal enterotoxin A; pokeweed antiviral protein; diphtherin toxin; and Pseudomonas endotoxin.

### Exemplary TMMPs

[0552] A TMMP of the present disclosure comprises at least one heterodimer comprising: a) a first polypeptide comprising: i) a MUC1 peptide; and ii) first MHC polypeptide; b) a second polypeptide comprising a second MHC polypeptide, and c) at least one immunomodulatory polypeptide, where the first and/or the second polypeptide comprises the immunomodulatory polypeptide. Thus, in some cases, a TMMP of the present disclosure comprises at least one heterodimer comprising: a) a first polypeptide comprising: i) a MUC1 peptide; ii) first MHC polypeptide; and iii) at least one immunomodulatory polypeptide; and b) a second polypeptide comprising a second MHC polypeptide. In other instances, a TMMP of the present disclosure comprises at least one heterodimer comprising: a) a first polypeptide comprising: i) a MUC1 peptide; and ii) first MHC polypeptide; and b) a second polypeptide comprising: i) a second MHC polypeptide; and ii) at least one immunomodulatory polypeptide. In some cases, a TMMP of the present disclosure comprises at least one heterodimer comprising: a) a first polypeptide comprising: i) a MUC1 peptide; ii) first MHC polypeptide; and iii) at least one immunomodulatory polypeptide; and b) a second polypeptide comprising: i) a second MHC polypeptide; and ii) at least one immunomodulatory polypeptide. In some cases, the at least one immunomodulatory polypeptide is a wild-type immunomodulatory polypeptide. In other cases, the at least one immunomodulatory polypeptide is a variant immunomodulatory polypeptide that exhibits reduced affinity for a co-immunomodulatory polypeptide, compared to the affinity of a corresponding wild-type immunomodulatory polypeptide for the co-immunomodulatory polypeptide. In some cases, a TMMP of the present disclosure comprises two immunomodulatory polypeptides, where the two immunomodulatory polypeptides have the same amino acid sequence. In some cases, the at least one immunomodulatory polypeptide is an IL-2 polypeptide, e.g., a variant IL-2 polypeptide as described herein. Suitable MUC1 peptides are described herein.

[0553] As noted above, and as depicted schematically in FIG. 16, an immunomodulatory polypeptide (i.e., one or more immunomodulatory polypeptides) can be present in a TMMP of the present disclosure at any of a variety of positions. FIG. 16 depicts the position of two copies of a variant IL-2 polypeptide; however, the immunomodulatory polypeptide can be any of a variety of immunomodulatory polypeptide, as described herein. As depicted in FIG. 16, an immunomodulatory polypeptide can be: 1) N-terminal to the MHC class I heavy chain (position 1); 2) C-terminal to the MHC class I heavy chain and N-terminal to the Ig Fc polypeptide; in other words, between the MHC class I heavy chain and the Ig Fc polypeptide (position 2); 3) C-terminal to the Ig Fc polypeptide (position 3); 4) N-terminal to the peptide epitope (position 4); or 5) C-terminal to the β2M polypeptide (position 5). “Position 1” refers to a position of the immunomodulatory polypeptide on the same polypeptide chain as the class I MHC heavy chain and N-terminal to the class I MHC heavy chain; e.g., where the TMMP comprises: a) a first polypeptide comprising, in order from N-terminus to C-terminus: i) a peptide epitope (e.g., a MUC1 peptide); and ii) a β2M polypeptide; and b) a second polypeptide comprising, in order from N-terminus to C-terminus: i) one or more immunomodulatory polypeptides; and ii) a class I MHC heavy chain polypeptide. “Position 2” refers to a position of the immunomodulatory polypeptide on the same polypeptide chain as the class I MHC heavy chain and C-terminal to the class I MHC heavy chain, but not at the C-terminus of the polypeptide chain; e.g., where the TMMP comprises: a) a first polypeptide comprising, in order from N-terminus to C-terminus: i) a peptide epitope (e.g., a MUC1 peptide); and ii) a β2M polypeptide; and b) a second polypeptide comprising, in order from N-terminus to C-terminus: i) a class I MHC heavy chain polypeptide; ii) one or more immunomodulatory polypeptides; and iii) an Ig Fc polypeptide. “Position 3” refers to a position of the immunomodulatory polypeptide on the same polypeptide chain as the class I MHC heavy chain and at the C-terminus of the polypeptide chain; e.g., where the TMMP comprises: a) a first polypeptide comprising, in order from N-terminus to C-terminus: i) a peptide epitope (e.g., a MUC1 peptide); and ii) a β2M polypeptide; and b) a second polypeptide comprising, in order from N-terminus to C-terminus: i) a class I MHC heavy chain polypeptide; ii) an Ig Fc polypeptide; and iii) one or more immunomodulatory polypeptides. “Position 4” refers to a position of the immunomodulatory polypeptide on the same polypeptide chain as the β2M polypeptide and N-terminal to the peptide epitope and the β2M polypeptide; e.g., where the TMMP comprises: a) a first polypeptide comprising, in order from N-terminus to C-terminus: i) one or more immunomodulatory polypeptides; ii) a peptide epitope (e.g., a MUC1 peptide); and iii) a β2M polypeptide; and b) a second polypeptide comprising a class I MHC heavy chain polypeptide (e.g., a second polypeptide comprising, in order from N-terminus to C-terminus: i) a class I MHC heavy chain polypeptide; and ii) an Ig Fc polypeptide. “Position 5” refers to a position of the immunomodulatory polypeptide on the same polypeptide chain as the β2M polypeptide and C-terminal to the β2M polypeptide (e.g., at the C-terminus of the polypeptide chain); e.g., where the TMMP comprises: a) a first polypeptide comprising, in order from N-terminus to C-terminus: i) a peptide epitope (e.g., a MUC1 peptide); ii) a β2M polypeptide; and iii) one or more immunomodulatory polypeptides; and b) a second polypeptide comprising a class I MHC heavy chain polypeptide (e.g., a second polypeptide comprising, in order from N-terminus to C-terminus: i) a class I MHC heavy chain polypeptide; and ii) an Ig Fc polypeptide.

[0554] Furthermore, as discussed above and as depicted schematically in FIG. 15A-15C, the first polypeptide chain and the second polypeptide chain of a TMMP of the present disclosure can be linked by one or more disulfide bonds. For example, a TMMMP of the present disclosure can comprise: a) a first polypeptide chain comprising an β2M polypeptide having an R12C substitution; and b) a second polypeptide chain comprising a class I MHC heavy chain polypeptide having an A236C substitution; such that a disulfide bond forms between the Cys at position 12 of the β2M polypeptide in the first polypeptide chain and the Cys at position 236 of the class I MHC heavy chain polypeptide in the second polypeptide chain. As another example, a TMMMP of the present disclosure can comprise: a) a first polypeptide comprising, in order from N-terminus to C-terminus: i) a peptide epitope; ii) a peptide linker comprising a GCGGS(GGGGS)ₙ (SEQ ID NO:140) sequence, where n is 1, 2, or 3; and iii) a β2M polypeptide; and b) a second polypeptide comprising a class I MHC heavy chain polypeptide having a Y84C substitution, such that a disulfide bond forms between the Cys in the peptide linker in the first polypeptide chain and the Cys at position 84 of the class I MHC heavy chain polypeptide in the second polypeptide chain. In other examples, a TMMP of the present disclosure can comprise: a) a first polypeptide comprising, in order from N-terminus to C-terminus: i) a peptide epitope; ii) a peptide linker comprising a GCGGS(GGGGS)ₙ (SEQ ID NO:140) sequence, where n is 1, 2, or 3; and iii) a β2M polypeptide having an R12C substitution; and b) a second polypeptide comprising a class I MHC heavy chain polypeptide having a Y84C substitution and an A236C substitution; such that: i) a first disulfide bond forms between the Cys in the peptide linker in the first polypeptide chain and the Cys at position 84 of the class I MHC heavy chain polypeptide in the second polypeptide chain; and ii) a second disulfide bond forms between the Cys at position 12 of the β2M polypeptide in the first polypeptide chain and the Cys at position 236 of the class I MHC heavy chain polypeptide in the second polypeptide chain. For simplicity, the first disulfide bond is referred to as “G2C/Y84C”; and the second disulfide bond is referred to as “R12C/A236C.” A TMMP of the present disclosure can include: a) a G2C/Y84C disulfide bond and not an R12C/A236C disulfide bond; b) an R12C/A236C disulfide bond and not a G2C/Y84C disulfide bond; or c) a G2C/Y84C disulfide bond and an R12C/A236C disulfide bond.

[0555] A TMMP of the present disclosure can include: a) a G2C/Y84C disulfide bond and not an R12C/A236C disulfide bond; and b) at least one immunomodulatory polypeptide at position 1. A TMMP of the present disclosure can include: a) a G2C/Y84C disulfide bond and not an R12C/A236C disulfide bond; and b) at least one immunomodulatory polypeptide at position 2. A TMMP of the present disclosure can include: a) a G2C/Y84C disulfide bond and not an R12C/A236C disulfide bond; and b) at least one immunomodulatory polypeptide at position 3. A TMMP of the present disclosure can include: a) a G2C/Y84C disulfide bond and not an R12C/A236C disulfide bond; and b) at least one immunomodulatory polypeptide at position 4. A TMMP of the present disclosure can include: a) a G2C/Y84C disulfide bond and not an R12C/A236C disulfide bond; and b) at least one immunomodulatory polypeptide at position 5.

[0556] A TMMP of the present disclosure can include: a) an R12C/A236C disulfide bond and not a G2C/Y84C disulfide bond; and at least one immunomodulatory polypeptide at position 1. A TMMP of the present disclosure can include: a) an R12C/A236C disulfide bond and not a G2C/Y84C disulfide bond; and at least one immunomodulatory polypeptide at position 2. A TMMP of the present disclosure can include: a) an R12C/A236C disulfide bond and not a G2C/Y84C disulfide bond; and at least one immunomodulatory polypeptide at position 3. A TMMP of the present disclosure can include: a) an R12C/A236C disulfide bond and not a G2C/Y84C disulfide bond; and at least one immunomodulatory polypeptide at position 4. A TMMP of the present disclosure can include: a) an R12C/A236C disulfide bond and not a G2C/Y84C disulfide bond; and at least one immunomodulatory polypeptide at position 5.

[0557] A TMMP of the present disclosure can include: a) a G2C/Y84C disulfide bond and an R12C/A236C disulfide bond; and b) and at least one immunomodulatory polypeptide at position 1. A TMMP of the present disclosure can include: a) a G2C/Y84C disulfide bond and an R12C/A236C disulfide bond; and b) and at least one immunomodulatory polypeptide at position 2. A TMMP of the present disclosure can include: a) a G2C/Y84C disulfide bond and an R12C/A236C disulfide bond; and b) and at least one immunomodulatory polypeptide at position 3. A TMMP of the present disclosure can include: a) a G2C/Y84C disulfide bond and an R12C/A236C disulfide bond; and b) and at least one immunomodulatory polypeptide at position 4. A TMMP of the present disclosure can include: a) a G2C/Y84C disulfide bond and an R12C/A236C disulfide bond; and b) and at least one immunomodulatory polypeptide at position 5.

[0558] A TMMP of the present disclosure comprises at least one heterodimer comprising: a) a first polypeptide comprising: i) a MUC1 peptide; and ii) first MHC polypeptide; b) a second polypeptide comprising a second MHC polypeptide, and c) at least one immunomodulatory polypeptide, where the first and/or the second polypeptide comprises the immunomodulatory polypeptide. Thus, in some cases, a TMMP of the present disclosure comprises at least one heterodimer comprising: a) a first polypeptide comprising: i) a MUC1 peptide; ii) first MHC polypeptide; and iii) at least one immunomodulatory polypeptide; and b) a second polypeptide comprising a second MHC polypeptide. In other instances, a TMMP of the present disclosure comprises at least one heterodimer comprising: a) a first polypeptide comprising: i) a MUC1 peptide; and ii) first MHC polypeptide; and b) a second polypeptide comprising: i) a second MHC polypeptide; and ii) at least one immunomodulatory polypeptide. In some cases, a TMMP of the present disclosure comprises at least one heterodimer comprising: a) a first polypeptide comprising: i) a MUC1 peptide; ii) first MHC polypeptide; and iii) at least one immunomodulatory polypeptide; and b) a second polypeptide comprising: i) a second MHC polypeptide; and ii) at least one immunomodulatory polypeptide. In some cases, the at least one immunomodulatory polypeptide is a wild-type immunomodulatory polypeptide. In other cases, the at least one immunomodulatory polypeptide is a variant immunomodulatory polypeptide that exhibits reduced affinity for a co-immunomodulatory polypeptide, compared to the affinity of a corresponding wild-type immunomodulatory polypeptide for the co-immunomodulatory polypeptide. In some cases, a TMMP of the present disclosure comprises two immunomodulatory polypeptides, where the two immunomodulatory polypeptides have the same amino acid sequence. In some cases, the at least one immunomodulatory polypeptide is an IL-2 polypeptide, e.g., a variant IL-2 polypeptide as described herein. In some cases, the MUC1 peptide has the amino acid sequence STAPPVHNV (SEQ ID NO:587) and has a length of 9 amino acids. In some cases, the MUC1 peptide has the amino acid sequence SLAPPVHNV (SEQ ID NO:588) and has a length of 9 amino acids. In some cases, the MUC1 peptide has the amino acid sequence STAPPAHGV (SEQ ID NO:586) and has a length of 9 amino acids. In some cases, the MUC1 peptide has the amino acid sequence SLAPPAHGV (SEQ ID NO:589) and has a length of 9 amino acids. In some cases, the second MHC polypeptide is an HLA heavy chain that comprises an amino acid sequence having at least 95% amino acid sequence identity to an HLA-A*0201 polypeptide; and the first MHC polypeptide is a β2M polypeptide.

[0559] In some cases, a TMMP of the present disclosure comprises: a) a first polypeptide comprising, in order from N-terminus to C-terminus: i) a MUC1 peptide; ii) a first MHC polypeptide; and iii) at least one immunomodulatory polypeptide; and b) a second polypeptide comprising, in order from N-terminus to C-terminus: i) a second MHC polypeptide; and ii) an Ig Fc polypeptide. In some cases, the first MHC polypeptide is a β2M polypeptide; and the second MHC polypeptide is an HLA heavy chain polypeptide. In some cases, the HLA heavy chain polypeptide is an HLA-A*0201 polypeptide. In some cases, the HLA heavy chain polypeptide is an HLA-A*0201 polypeptide with an A236C substitution. In some cases, the first polypeptide comprises, in order from N-terminus to C-terminus: i) a peptide epitope; ii) a first MHC polypeptide; and iii) two immunomodulatory polypeptides, where the two immunomodulatory polypeptides have the same amino acid sequence. In some cases, the Ig Fc polypeptide is a human IgG1 Fc polypeptide. In some cases, the Ig Fc polypeptide is an IgG1 Fc polypeptide comprising L234A and L235A substitutions. In some cases, the first and the second polypeptides are disulfide linked to one another. In some cases, the immunomodulatory polypeptide is a variant IL-2 polypeptide comprising H16A and F42A substitutions. In some cases, the immunomodulatory polypeptide is a variant IL-2 polypeptide comprising H16T and F42A substitutions. In some cases, a peptide linker is between one or more of: i) the second MHC polypeptide and the Ig Fc polypeptide; ii) the epitope and the first MHC polypeptide; iii) the first MHC polypeptide and the immunomodulatory polypeptide; and (where the TMMP comprises two immunomodulatory polypeptides on the first polypeptide chain) iv) between the two immunomodulatory polypeptides. In some cases, the peptide linker comprises the amino acid sequence AAAGG (SEQ ID NO: 387). In some cases, the peptide linker comprises the amino acid sequence (GGGGS)n (SEQ ID NO: 254), where n is an integer from 1 to 10 (e.g., where n is 2, 3, or 4). In some cases, the MUC1 peptide has the amino acid sequence STAPPVHNV (SEQ ID NO:587) and has a length of 9 amino acids. In some cases, the MUC1 peptide has the amino acid sequence SLAPPVHNV (SEQ ID NO:588) and has a length of 9 amino acids. In some cases, the MUC1 peptide has the amino acid sequence STAPPAHGV (SEQ ID NO:586) and has a length of 9 amino acids. In some cases, the MUC1 peptide has the amino acid sequence SLAPPAHGV (SEQ ID NO:589) and has a length of 9 amino acids.

[0560] In some cases, a TMMP of the present disclosure comprises: a) a first polypeptide comprising, in order from N-terminus to C-terminus: i) a MUC1 peptide; and ii) a first MHC polypeptide; and b) a second polypeptide comprising, in order from N-terminus to C-terminus: i) at least one immunomodulatory polypeptide; ii) a second MHC polypeptide; and iii) an Ig Fc polypeptide. In some cases, the first MHC polypeptide is a β2M polypeptide; and the second MHC polypeptide is an HLA heavy chain polypeptide. In some cases, the HLA heavy chain polypeptide is an HLA-A*0201 polypeptide. In some cases, the HLA heavy chain polypeptide is an HLA-A*0201 polypeptide with an A236C substitution. In some cases, the second polypeptide comprises, in order from N-terminus to C-terminus: i) two immunomodulatory polypeptides, where the two immunomodulatory polypeptides have the same amino acid sequence; ii) a second MHC polypeptide; and iii) an Ig Fc polypeptide. In some cases, the Ig Fc polypeptide is a human IgG1 Fc polypeptide. In some cases, the Ig Fc polypeptide is an IgG1 Fc polypeptide comprising L234A and L235A substitutions. In some cases, the first and the second polypeptides are disulfide linked to one another. In some cases, the immunomodulatory polypeptide is a variant IL-2 polypeptide comprising H16A and F42A substitutions. In some cases, the immunomodulatory polypeptide is a variant IL-2 polypeptide comprising H16T and F42A substitutions. In some cases, a peptide linker is between one or more of: i) the second MHC polypeptide and the Ig Fc polypeptide; ii) the epitope and the first MHC polypeptide; iii) the first MHC polypeptide and the immunomodulatory polypeptide; and (where the TMMP comprises two immunomodulatory polypeptides on the second polypeptide chain) iv) between the two immunomodulatory polypeptides. In some cases, the peptide linker comprises the amino acid sequence AAAGG (SEQ ID NO: 387). In some cases, the peptide linker comprises the amino acid sequence (GGGGS)n (SEQ ID NO: 254), where n is an integer from 1 to 10 (e.g., where n is 2, 3, or 4). In some cases, the MUC1 peptide has the amino acid sequence STAPPVHNV (SEQ ID NO:587) and has a length of 9 amino acids. In some cases, the MUC1 peptide has the amino acid sequence SLAPPVHNV (SEQ ID NO:588) and has a length of 9 amino acids. In some cases, the MUC1 peptide has the amino acid sequence STAPPAHGV (SEQ ID NO:589) and has a length of 9 amino acids. In some cases, the MUC1 peptide has the amino acid sequence SLAPPAHGV (SEQ ID NO:589) and has a length of 9 amino acids.

[0561] In some cases, a TMMP of the present disclosure comprises: a) a first polypeptide comprising, in order from N-terminus to C-terminus: i) a MUC1 peptide; and ii) a first MHC polypeptide; and b) a second polypeptide comprising, in order from N-terminus to C-terminus: i) a second MHC polypeptide; ii) an Ig Fc polypeptide; and iii) at least one immunomodulatory polypeptide. In some cases, the first MHC polypeptide is a β2M polypeptide; and the second MHC polypeptide is an HLA heavy chain polypeptide. In some cases, the HLA heavy chain polypeptide is an HLA-A*0201 polypeptide. In some cases, the HLA heavy chain polypeptide is an HLA-A*0201 polypeptide with an A236C substitution. In some cases, the second polypeptide comprises, in order from N-terminus to C-terminus: i) a second MHC polypeptide; ii) an Ig Fc polypeptide; and iii) two immunomodulatory polypeptides, where the two immunomodulatory polypeptides have the same amino acid sequence. In some cases, the Ig Fc polypeptide is a human IgG1 Fc polypeptide. In some cases, the Ig Fc polypeptide is an IgG1 Fc polypeptide comprising L234A and L235A substitutions. In some cases, the first and the second polypeptides are disulfide linked to one another. In some cases, the immunomodulatory polypeptide is a variant IL-2 polypeptide comprising H16A and F42A substitutions. In some cases, the immunomodulatory polypeptide is a variant IL-2 polypeptide comprising H16T and F42A substitutions. In some cases, a peptide linker is between one or more of: i) the second MHC polypeptide and the Ig Fc polypeptide; ii) the epitope and the first MHC polypeptide; iii) the Ig Fc polypeptide and the immunomodulatory polypeptide; and (where the TMMP comprises two immunomodulatory polypeptides on the second polypeptide chain) iv) between the two immunomodulatory polypeptides. In some cases, the peptide linker comprises the amino acid sequence AAAGG (SEQ ID NO: 387). In some cases, the peptide linker comprises the amino acid sequence (GGGGS)n (SEQ ID NO:254), where n is an integer from 1 to 10 (e.g., where n is 2, 3, or 4). In some cases, the MUC1 peptide has the amino acid sequence STAPPVHNV (SEQ ID NO:587) and has a length of 9 amino acids. In some cases, the MUC1 peptide has the amino acid sequence SLAPPVHNV (SEQ ID NO:588) and has a length of 9 amino acids. In some cases, the MUC1 peptide has the amino acid sequence STAPPAHGV (SEQ ID NO:586) and has a length of 9 amino acids. In some cases, the MUC1 peptide has the amino acid sequence SLAPPAHGV (SEQ ID NO:589) and has a length of 9 amino acids.

[0562] In some cases, a TMMP of the present disclosure comprises: a) a first polypeptide comprising, in order from N-terminus to C-terminus: i) a MUC1 peptide; and ii) a first MHC polypeptide; and b) a second polypeptide comprising, in order from N-terminus to C-terminus: i) at least one immunomodulatory polypeptide; ii) a second MHC polypeptide; and iii) an Ig Fc polypeptide. In some cases, the first MHC polypeptide is a β2M polypeptide; and the second MHC polypeptide is an HLA heavy chain polypeptide. In some cases, the HLA heavy chain polypeptide is an HLA-A*0201 polypeptide. In some cases, the HLA heavy chain polypeptide is an HLA-A*0201 polypeptide with an A236C substitution. In some cases, the Ig Fc polypeptide is a human IgG1 Fc polypeptide. In some cases, the Ig Fc polypeptide is an IgG1 Fc polypeptide comprising L234A and L235A substitutions. In some cases, the first and the second polypeptides are disulfide linked to one another. In some cases, the immunomodulatory polypeptide is a variant IL-2 polypeptide comprising H16A and F42A substitutions. In some cases, the immunomodulatory polypeptide is a variant IL-2 polypeptide comprising H16T and F42A substitutions. In some cases, the MUC1 peptide has the amino acid sequence STAPPVHNV (SEQ ID NO:587) and has a length of 9 amino acids. In some cases, the MUC1 peptide has the amino acid sequence SLAPPVHNV (SEQ ID NO:588) and has a length of 9 amino acids. In some cases, the MUC1 peptide has the amino acid sequence STAPPAHGV (SEQ ID NO:586) and has a length of 9 amino acids. In some cases, the MUC1 peptide has the amino acid sequence SLAPPAHGV (SEQ ID NO:589) and has a length of 9 amino acids.

[0563] In some cases, a TMMP of the present disclosure comprises: a) a first polypeptide comprising, in order from N-terminus to C-terminus: i) at least one immunomodulatory polypeptide; ii) a MUC1 peptide; and iii) a first MHC polypeptide; and b) a second polypeptide comprising, in order from N-terminus to C-terminus: i) a second MHC polypeptide; and ii) an Ig Fc polypeptide. In some cases, the first MHC polypeptide is a β2M polypeptide; and the second MHC polypeptide is an HLA heavy chain polypeptide. In some cases, the HLA heavy chain polypeptide is an HLA-A*0201 polypeptide. In some cases, the HLA heavy chain polypeptide is an HLA-A*0201 polypeptide with an A236C substitution. In some cases, the first polypeptide comprises, in order from N-terminus to C-terminus: i) two immunomodulatory polypeptides, where the two immunomodulatory polypeptides have the same amino acid sequence; ii) a peptide epitope; and iii) a first MHC polypeptide. In some cases, the Ig Fc polypeptide is a human IgG1 Fc polypeptide. In some cases, the Ig Fc polypeptide is an IgG1 Fc polypeptide comprising L234A and L235A substitutions. In some cases, the first and the second polypeptides are disulfide linked to one another. In some cases, the immunomodulatory polypeptide is a variant IL-2 polypeptide comprising H16A and F42A substitutions. In some cases, the immunomodulatory polypeptide is a variant IL-2 polypeptide comprising H16T and F42A substitutions. In some cases, a peptide linker is between one or more of: i) the second MHC polypeptide and the Ig Fc polypeptide; ii) the MUC1 peptide and the first MHC polypeptide; iii) the immunomodulatory polypeptide and the MUC1 peptide; and (where the TMMP comprises two immunomodulatory polypeptides on the first polypeptide chain) iv) between the two immunomodulatory polypeptides. In some cases, the peptide linker comprises the amino acid sequence AAAGG (SEQ ID NO: 387). In some cases, the peptide linker comprises the amino acid sequence (GGGGS)n (SEQ ID NO:254), where n is an integer from 1 to 10 (e.g., where n is 2, 3, or 4). In some cases, the MUC1 peptide has the amino acid sequence STAPPVHNV (SEQ ID NO:587) and has a length of 9 amino acids. In some cases, the MUC1 peptide has the amino acid sequence SLAPPVHNV (SEQ ID NO:588) and has a length of 9 amino acids. In some cases, the MUC1 peptide has the amino acid sequence STAPPAHGV (SEQ ID NO:586) and has a length of 9 amino acids. In some cases, the MUC1 peptide has the amino acid sequence SLAPPAHGV (SEQ ID NO:589) and has a length of 9 amino acids.

[0564] In some cases, a TMMP of the present disclosure comprises: a) a first polypeptide comprising, in order from N-terminus to C-terminus: i) a MUC1 peptide; and ii) a first MHC polypeptide; and b) a second polypeptide comprising, in order from N-terminus to C-terminus: i) a second MHC polypeptide; ii) at least one immunomodulatory polypeptide; and iii) an Ig Fc polypeptide. In some cases, the first MHC polypeptide is a β2M polypeptide; and the second MHC polypeptide is an HLA heavy chain polypeptide. In some cases, the HLA heavy chain polypeptide is an HLA-A*0201 polypeptide. In some cases, the HLA heavy chain polypeptide is an HLA-A*0201 polypeptide with an A236C substitution. In some cases, the second polypeptide comprises, in order from N-terminus to C-terminus: i) a second MHC polypeptide; ii) two immunomodulatory polypeptides, where the two immunomodulatory polypeptides have the same amino acid sequence; and iii) an Ig Fc polypeptide. In some cases, the Ig Fc polypeptide is a human IgG1 Fc polypeptide. In some cases, the Ig Fc polypeptide is an IgG1 Fc polypeptide comprising L234A and L235A substitutions. In some cases, the first and the second polypeptides are disulfide linked to one another. In some cases, the immunomodulatory polypeptide is a variant IL-2 polypeptide comprising H16A and F42A substitutions. In some cases, the immunomodulatory polypeptide is a variant IL-2 polypeptide comprising H16T and F42A substitutions. In some cases, a peptide linker is between one or more of: i) the second MHC polypeptide and the immunomodulatory polypeptide; ii) the immunomodulatory polypeptide and the Ig Fc polypeptide; iii) the MUC1 peptide and the first MHC polypeptide; iii) the first MHC polypeptide and the immunomodulatory polypeptide; and (where the TMMP comprises two immunomodulatory polypeptides on the second polypeptide chain) iv) between the two immunomodulatory polypeptides. In some cases, the peptide linker comprises the amino acid sequence AAAGG (SEQ ID NO: 387). In some cases, the peptide linker comprises the amino acid sequence (GGGGS)n (SEQ ID NO:254), where n is an integer from 1 to 10 (e.g., where n is 2, 3, or 4). In some cases, the MUC1 peptide has the amino acid sequence STAPPVHNV (SEQ ID NO:587) and has a length of 9 amino acids. In some cases, the MUC1 peptide has the amino acid sequence g147SLAPPVHNV (SEQ ID NO:588) and has a length of 9 amino acids. In some cases, the MUC1 peptide has the amino acid sequence STAPPAHGV (SEQ ID NO:586) and has a length of 9 amino acids. In some cases, the MUC1 peptide has the amino acid sequence SLAPPAHGV (SEQ ID NO:589) and has a length of 9 amino acids.

[0565] As one non-limiting example, a TMMP of the present disclosure can comprise: a) a first polypeptide comprising the amino acid sequence depicted in FIG. 13A; and b) a second polypeptide comprising the amino acid sequence depicted in FIG. 14A. As a further example, a TMMP of the present disclosure can comprise: a) a first polypeptide comprising the amino acid sequence depicted in FIG. 13A; and b) a second polypeptide comprising the amino acid sequence depicted in FIG. 14B. As a further example, a TMMP of the present disclosure can comprise: a) a first polypeptide comprising the amino acid sequence depicted in FIG. 13A; and b) a second polypeptide comprising the amino acid sequence depicted in FIG. 14C. As a further example, a TMMP of the present disclosure can comprise: a) a first polypeptide comprising the amino acid sequence depicted in FIG. 13A; and b) a second polypeptide comprising the amino acid sequence depicted in FIG. 14D. As a further example, a TMMP of the present disclosure can comprise: a) a first polypeptide comprising the amino acid sequence depicted in FIG. 13A; and b) a second polypeptide comprising the amino acid sequence depicted in FIG. 14E. As a further example, a TMMP of the present disclosure can comprise: a) a first polypeptide comprising the amino acid sequence depicted in FIG. 13A; and b) a second polypeptide comprising the amino acid sequence depicted in FIG. 14F. As a further example, a TMMP of the present disclosure can comprise: a) a first polypeptide comprising the amino acid sequence depicted in FIG. 13A; and b) a second polypeptide comprising the amino acid sequence depicted in FIG. 14G. As a further example, a TMMP of the present disclosure can comprise: a) a first polypeptide comprising the amino acid sequence depicted in FIG. 13A; and b) a second polypeptide comprising the amino acid sequence depicted in FIG. 14H. As a further example, a TMMP of the present disclosure can comprise: a) a first polypeptide comprising the amino acid sequence depicted in FIG. 13A; and b) a second polypeptide comprising the amino acid sequence depicted in FIG. 14I. As a further example, a TMMP of the present disclosure can comprise: a) a first polypeptide comprising the amino acid sequence depicted in FIG. 13A; and b) a second polypeptide comprising the amino acid sequence depicted in FIG. 14J. As a further example, a TMMP of the present disclosure can comprise: a) a first polypeptide comprising the amino acid sequence depicted in FIG. 13A; and b) a second polypeptide comprising the amino acid sequence depicted in FIG. 14K. As a further example, a TMMP of the present disclosure can comprise: a) a first polypeptide comprising the amino acid sequence depicted in FIG. 13A; and b) a second polypeptide comprising the amino acid sequence depicted in FIG. 14L.

[0566] As one non-limiting example, a TMMP of the present disclosure can comprise: a) a first polypeptide comprising the amino acid sequence depicted in FIG. 13B; and b) a second polypeptide comprising the amino acid sequence depicted in FIG. 14A. As a further example, a TMMP of the present disclosure can comprise: a) a first polypeptide comprising the amino acid sequence depicted in FIG. 13B; and b) a second polypeptide comprising the amino acid sequence depicted in FIG. 14B. As a further example, a TMMP of the present disclosure can comprise: a) a first polypeptide comprising the amino acid sequence depicted in FIG. 13B; and b) a second polypeptide comprising the amino acid sequence depicted in FIG. 14C. As a further example, a TMMP of the present disclosure can comprise: a) a first polypeptide comprising the amino acid sequence depicted in FIG. 13B; and b) a second polypeptide comprising the amino acid sequence depicted in FIG. 14D. As a further example, a TMMP of the present disclosure can comprise: a) a first polypeptide comprising the amino acid sequence depicted in FIG. 13B; and b) a second polypeptide comprising the amino acid sequence depicted in FIG. 14E. As a further example, a TMMP of the present disclosure can comprise: a) a first polypeptide comprising the amino acid sequence depicted in FIG. 13B; and b) a second polypeptide comprising the amino acid sequence depicted in FIG. 14F. As a further example, a TMMP of the present disclosure can comprise: a) a first polypeptide comprising the amino acid sequence depicted in FIG. 13B; and b) a second polypeptide comprising the amino acid sequence depicted in FIG. 14G. As a further example, a TMMP of the present disclosure can comprise: a) a first polypeptide comprising the amino acid sequence depicted in FIG. 13B; and b) a second polypeptide comprising the amino acid sequence depicted in FIG. 14H. As a further example, a TMMP of the present disclosure can comprise: a) a first polypeptide comprising the amino acid sequence depicted in FIG. 13B; and b) a second polypeptide comprising the amino acid sequence depicted in FIG. 14I. As a further example, a TMMP of the present disclosure can comprise: a) a first polypeptide comprising the amino acid sequence depicted in FIG. 13B; and b) a second polypeptide comprising the amino acid sequence depicted in FIG. 14J. As a further example, a TMMP of the present disclosure can comprise: a) a first polypeptide comprising the amino acid sequence depicted in FIG. 13B; and b) a second polypeptide comprising the amino acid sequence depicted in FIG. 14K. As a further example, a TMMP of the present disclosure can comprise: a) a first polypeptide comprising the amino acid sequence depicted in FIG. 13B; and b) a second polypeptide comprising the amino acid sequence depicted in FIG. 14L.

### Methods of Generating a Multimeric T-Cell Modulatory Polypeptide

[0567] The present disclosure provides a method of obtaining a TMMP comprising one or more variant immunomodulatory polypeptides that exhibit lower affinity for a cognate co-immunomodulatory polypeptide compared to the affinity of the corresponding parental wild-type immunomodulatory polypeptide for the co-immunomodulatory polypeptide, the method comprising: A) generating a library of TMMPs comprising a plurality of members, wherein each member comprises: a) a first polypeptide comprising: i) an epitope; and ii) a first major MHC polypeptide; and b) a second polypeptide comprising: i) a second MHC polypeptide; and ii) optionally an Ig Fc polypeptide or a non-Ig scaffold, wherein each member comprises a different variant immunomodulatory polypeptide on the first polypeptide, the second polypeptide, or both the first and the second polypeptide; B) determining the affinity of each member of the library for a cognate co-immunomodulatory polypeptide; and C) selecting a member that exhibits reduced affinity for the cognate co-immunomodulatory polypeptide. In some cases, the affinity is determined by bio-layer interferometry (BLI) using purified TMMP library members and the cognate co-immunomodulatory polypeptide. BLI methods are well known to those skilled in the art. A BLI assay is described above. See, e.g., Lad et al. (2015) J. Biomol. Screen. 20(4): 498-507; and Shah and Duncan (2014) J. Vis. Exp. 18:e51383.

[0568] The present disclosure provides a method of obtaining a TMMP that exhibits selective binding to a T-cell, the method comprising: A) generating a library of TMMPs comprising a plurality of members, wherein each member comprises: a) a first polypeptide comprising: i) an epitope; and ii) a first MHC polypeptide; and b) a second polypeptide comprising: i) a second MHC polypeptide; and ii) optionally an immunoglobulin (Ig) Fc polypeptide or a non-Ig scaffold, wherein each member comprises a different variant immunomodulatory polypeptide on the first polypeptide, the second polypeptide, or both the first and the second polypeptide, wherein the variant immunomodulatory polypeptide differs in amino acid sequence by from 1 amino acid to 10 amino acids from a parental wild-type immunomodulatory polypeptide; B) contacting a TMMP library member with a target T-cell expressing on its surface: i) a cognate co-immunomodulatory polypeptide that binds the parental wild-type immunomodulatory polypeptide; and ii) a T-cell receptor that binds to the epitope, wherein the TMMP library member comprises an epitope tag, such that the TMMP library member binds to the target T-cell; C) contacting the TMMP library member bound to the target T-cell with a fluorescently labeled binding agent that binds to the epitope tag, generating a TMMP library member/target T-cell/binding agent complex; D) measuring the mean fluorescence intensity (MFI) of the TMMP library member/target T-cell/binding agent complex using flow cytometry, wherein the MFI measured over a range of concentrations of the TMMP library member provides a measure of the affinity and apparent avidity; and E) selecting a TMMP library member that selectively binds the target T cell, compared to binding of the TMMP library member to a control T cell that comprises: i) the cognate co-immunomodulatory polypeptide that binds the parental wild-type immunomodulatory polypeptide; and ii) a T-cell receptor that binds to an epitope other than the epitope present in the TMMP library member. In some cases, a TMMP library member that is identified as selectively binds to a target T cell is isolated from the library.

[0569] In some cases, a parental wild-type immunomodulatory polypeptide and cognate immunomodulatory polypeptide pairs are selected from:

[0570] IL-2 and IL-2 receptor;

[0571] 4-1BBL and 4-1BB;

[0572] PD-L1 and PD-1;

[0573] CD70 and CD27;

[0574] TGFβ and TGFβ receptor;

[0575] CD80 and CD28;

[0576] CD86 and CD28;

[0577] OX40L and OX40;

[0578] FasL and Fas;

[0579] ICOS-L and ICOS;

[0580] ICAM and LFA-1;

[0581] JAG1 and Notch;

[0582] JAG1 and CD46;

[0583] CD80 and CTLA4; and

[0584] CD86 and CTLA4.

[0585] The present disclosure provides a method of obtaining a TMMP comprising one or more variant immunomodulatory polypeptides that exhibit reduced affinity for a cognate co-immunomodulatory polypeptide compared to the affinity of the corresponding parental wild-type immunomodulatory polypeptide for the co-immunomodulatory polypeptide, the method comprising selecting, from a library of TMMPs comprising a plurality of members, a member that exhibits reduced affinity for the cognate co-immunomodulatory polypeptide, wherein the plurality of member comprises: a) a first polypeptide comprising: i) an epitope; and ii) a first MHC polypeptide; and b) a second polypeptide comprising: i) a second MHC polypeptide; and ii) optionally an Ig Fc polypeptide or a non-Ig scaffold, wherein the members of the library comprise a plurality of variant immunomodulatory polypeptide present in the first polypeptide, the second polypeptide, or both the first and the second polypeptide. In some cases, the selecting step comprises determining the affinity, using bio-layer interferometry, of binding between TMMP library members and the cognate co-immunomodulatory polypeptide. In some cases, the TMMP is as described above.

[0586] In some cases, the method further comprises: a) contacting the selected TMMP library member with a target T-cell expressing on its surface: i) a cognate co-immunomodulatory polypeptide that binds the parental wild-type immunomodulatory polypeptide; and ii) a T-cell receptor that binds to the epitope, wherein the TMMP library member comprises an epitope tag, such that the TMMP library member binds to the target T-cell; b) contacting the selected TMMP library member bound to the target T-cell with a fluorescently labeled binding agent that binds to the epitope tag, generating a selected TMMP library member/target T-cell/binding agent complex; and c) measuring the mean fluorescence intensity (MFI) of the selected TMMP library member/target T-cell/binding agent complex using flow cytometry, wherein the MFI measured over a range of concentrations of the selected TMMP library member provides a measure of the affinity and apparent avidity. A selected TMMP library member that selectively binds the target T cell, compared to binding of the TMMP library member to a control T cell that comprises: i) the cognate co-immunomodulatory polypeptide that binds the parental wild-type immunomodulatory polypeptide; and ii) a T-cell receptor that binds to an epitope other than the epitope present in the TMMP library member, is identified as selectively binding to the target T cell. In some cases, the binding agent is an antibody specific for the epitope tag. In some cases, the variant immunomodulatory polypeptide comprises from 1 to 20 amino acid substitutions (e.g., 1, 2, 3, 4, 5, 6, 7, 8, 9, 10, 11, 12, 13, 14, 15, 16, 17, 18, 19, or 20 amino acid substitutions) compared to the corresponding parental wild-type immunomodulatory polypeptide. In some cases, the TMMP comprises two variant immunomodulatory polypeptides. In some cases, the two variant immunomodulatory polypeptides comprise the same amino acid sequence. In some cases, the first polypeptide comprises one of the two variant immunomodulatory polypeptides and wherein the second polypeptide comprises the second of the two variant immunomodulatory polypeptides. In some cases, the two variant immunomodulatory polypeptides are on the same polypeptide chain of the TMMP. In some cases, the two variant immunomodulatory polypeptides are on the first polypeptide of the TMMP. In some cases, the two variant immunomodulatory polypeptides are on the second polypeptide of the TMMP.

[0587] In some cases, the method further comprises isolating the selected TMMP library member from the library. In some cases, the method further comprises providing a nucleic acid comprising a nucleotide sequence encoding the selected TMMP library member. In some cases, the nucleic acid is present in a recombinant expression vector. In some cases, the nucleotide sequence is operably linked to a transcriptional control element that is functional in a eukaryotic cell. In some cases, the method further comprises introducing the nucleic acid into a eukaryotic host cell, and culturing the cell in a liquid medium to synthesize the encoded selected TMMP library member in the cell. In some cases, the method further comprises isolating the synthesized selected TMMP library member from the cell or from liquid culture medium comprising the cell. In some cases, the selected TMMP library member comprises an Ig Fc polypeptide. In some cases, the method further comprises conjugating a drug to the Ig Fc polypeptide. In some cases, the drug is a cytotoxic agent is selected from maytansinoid, benzodiazepine, taxoid, CC-1065, duocarmycin, a duocarmycin analog, calicheamicin, dolastatin, a dolastatin analog, auristatin, tomaymycin, and leptomycin, or a pro-drug of any one of the foregoing. In some cases, the drug is a retinoid. In some cases, the parental wild-type immunomodulatory polypeptide and the cognate immunomodulatory polypeptides are selected from: IL-2 and IL-2 receptor; 4-1BBL and 4-1BB; PD-L1 and PD-1; CD70 and CD27; TGFβ and TGFβ receptor; CD80 and CD28; CD86 and CD28; OX40L and OX40; FasL and Fas; ICOS-L and ICOS; ICAM and LFA-1; JAG1 and Notch; JAG1 and CD46; CD80 and CTLA4; and CD86 and CTLA4.

[0588] The present disclosure provides a method of obtaining a TMMP comprising one or more variant immunomodulatory polypeptides that exhibit reduced affinity for a cognate co-immunomodulatory polypeptide compared to the affinity of the corresponding parental wild-type immunomodulatory polypeptide for the co-immunomodulatory polypeptide, the method comprising: A) providing a library of TMMPs comprising a plurality of members, wherein the plurality of member comprises: a) a first polypeptide comprising: i) an epitope; and ii) a first MHC polypeptide; and b) a second polypeptide comprising: i) a second MHC polypeptide; and ii) optionally an Ig Fc polypeptide or a non-Ig scaffold, wherein the members of the library comprise a plurality of variant immunomodulatory polypeptide present in the first polypeptide, the second polypeptide, or both the first and the second polypeptide; and B) selecting from the library a member that exhibits reduced affinity for the cognate co-immunomodulatory polypeptide. In some cases, the selecting step comprises determining the affinity, using bio-layer interferometry, of binding between TMMP library members and the cognate co-immunomodulatory polypeptide. In some cases, the TMMP is as described above.

[0589] In some cases, the method further comprises: a) contacting the selected TMMP library member with a target T-cell expressing on its surface: i) a cognate co-immunomodulatory polypeptide that binds the parental wild-type immunomodulatory polypeptide; and ii) a T-cell receptor that binds to the epitope, wherein the TMMP library member comprises an epitope tag, such that the TMMP library member binds to the target T-cell; b) contacting the selected TMMP library member bound to the target T-cell with a fluorescently labeled binding agent that binds to the epitope tag, generating a selected TMMP library member/target T-cell/binding agent complex; and c) measuring the mean fluorescence intensity (MFI) of the selected TMMP library member/target T-cell/binding agent complex using flow cytometry, wherein the MFI measured over a range of concentrations of the selected TMMP library member provides a measure of the affinity and apparent avidity. A selected TMMP library member that selectively binds the target T cell, compared to binding of the TMMP library member to a control T cell that comprises: i) the cognate co-immunomodulatory polypeptide that binds the parental wild-type immunomodulatory polypeptide; and ii) a T-cell receptor that binds to an epitope other than the epitope present in the TMMP library member, is identified as selectively binding to the target T cell. In some cases, the binding agent is an antibody specific for the epitope tag. In some cases, the variant immunomodulatory polypeptide comprises from 1 to 20 amino acid substitutions (e.g., 1, 2, 3, 4, 5, 6, 7, 8, 9, 10, 11, 12, 13, 14, 15, 16, 17, 18, 19, or 20 amino acid substitutions) compared to the corresponding parental wild-type immunomodulatory polypeptide. In some cases, the TMMP comprises two variant immunomodulatory polypeptides. In some cases, the two variant immunomodulatory polypeptides comprise the same amino acid sequence. In some cases, the first polypeptide comprises one of the two variant immunomodulatory polypeptides and wherein the second polypeptide comprises the second of the two variant immunomodulatory polypeptides. In some cases, the two variant immunomodulatory polypeptides are on the same polypeptide chain of the TMMP. In some cases, the two variant immunomodulatory polypeptides are on the first polypeptide of the TMMP. In some cases, the two variant immunomodulatory polypeptides are on the second polypeptide of the TMMP.

[0590] In some cases, the method further comprises isolating the selected TMMP library member from the library. In some cases, the method further comprises providing a nucleic acid comprising a nucleotide sequence encoding the selected TMMP library member. In some cases, the nucleic acid is present in a recombinant expression vector. In some cases, the nucleotide sequence is operably linked to a transcriptional control element that is functional in a eukaryotic cell. In some cases, the method further comprises introducing the nucleic acid into a eukaryotic host cell, and culturing the cell in a liquid medium to synthesize the encoded selected TMMP library member in the cell. In some cases, the method further comprises isolating the synthesized selected TMMP library member from the cell or from liquid culture medium comprising the cell. In some cases, the selected TMMP library member comprises an Ig Fc polypeptide. In some cases, the method further comprises conjugating a drug to the Ig Fc polypeptide. In some cases, the drug is a cytotoxic agent is selected from maytansinoid, benzodiazepine, taxoid, CC-1065, duocarmycin, a duocarmycin analog, calicheamicin, dolastatin, a dolastatin analog, auristatin, tomaymycin, and leptomycin, or a pro-drug of any one of the foregoing. In some cases, the drug is a retinoid. In some cases, the parental wild-type immunomodulatory polypeptide and the cognate immunomodulatory polypeptides are selected from IL-2 and IL-2 receptor; 4-1BBL and 4-1BB; PD-L1 and PD-1; TGFβ and TGFβ receptor; CD80 and CD28; CD86 and CD28; OX40L and OX40; FasL and Fas; ICOS-L and ICOS; CD70 and CD27; ICAM and LFA-1; JAG1 and Notch; JAG1 and CD46; CD80 and CTLA4; and CD86 and CTLA4.

### Nucleic Acids

[0591] The present disclosure provides a nucleic acid comprising a nucleotide sequence encoding a TMMP of the present disclosure. The present disclosure provides a nucleic acid comprising a nucleotide sequence encoding a TMMP of the present disclosure.

[0592] The present disclosure provides nucleic acids comprising nucleotide sequences encoding a TMMP of the present disclosure. In some cases, the individual polypeptide chains of a TMMP of the present disclosure are encoded in separate nucleic acids. In some cases, all polypeptide chains of a TMMP of the present disclosure are encoded in a single nucleic acid. In some cases, a first nucleic acid comprises a nucleotide sequence encoding a first polypeptide of a TMMP of the present disclosure; and a second nucleic acid comprises a nucleotide sequence encoding a second polypeptide of a TMMP of the present disclosure. In some cases, single nucleic acid comprises a nucleotide sequence encoding a first polypeptide of a TMMP of the present disclosure and a second polypeptide of a TMMP of the present disclosure.

### Separate Nucleic Acids Encoding Individual Polypeptide Chains of a Multimeric Polypeptide

[0593] The present disclosure provides nucleic acids comprising nucleotide sequences encoding a TMMP of the present disclosure. As noted above, in some cases, the individual polypeptide chains of a TMMP of the present disclosure are encoded in separate nucleic acids. In some cases, nucleotide sequences encoding the separate polypeptide chains of a TMMP of the present disclosure are operably linked to transcriptional control elements, e.g., promoters, such as promoters that are functional in a eukaryotic cell, where the promoter can be a constitutive promoter or an inducible promoter.

[0594] The present disclosure provides a first nucleic acid and a second nucleic acid, where the first nucleic acid comprises a nucleotide sequence encoding a first polypeptide of a TMMP of the present disclosure, where the first polypeptide comprises, in order from N-terminus to C-terminus: a) an epitope (e.g., a T-cell epitope); b) a first MHC polypeptide; and c) an immunomodulatory polypeptide (e.g., a reduced-affinity variant, as described above); and where the second nucleic acid comprises a nucleotide sequence encoding a second polypeptide of a TMMP of the present disclosure, where the second polypeptide comprises, in order from N-terminus to C-terminus: a) a second MHC polypeptide; and b) an Ig Fc polypeptide. Suitable T-cell epitopes, MHC polypeptides, immunomodulatory polypeptides, and Ig Fc polypeptides, are described above. In some cases, the nucleotide sequences encoding the first and the second polypeptides are operably linked to transcriptional control elements. In some cases, the transcriptional control element is a promoter that is functional in a eukaryotic cell. In some cases, the nucleic acids are present in separate expression vectors.

[0595] The present disclosure provides a first nucleic acid and a second nucleic acid, where the first nucleic acid comprises a nucleotide sequence encoding a first polypeptide of a TMMP of the present disclosure, where the first polypeptide comprises, in order from N-terminus to C-terminus: a) an epitope (e.g., a T-cell epitope); and b) a first MHC polypeptide; and where the second nucleic acid comprises a nucleotide sequence encoding a second polypeptide of a TMMP of the present disclosure, where the second polypeptide comprises, in order from N-terminus to C-terminus: a) an immunomodulatory polypeptide (e.g., a reduced-affinity variant as described above); b) a second MHC polypeptide; and c) an Ig Fc polypeptide. Suitable T-cell epitopes, MHC polypeptides, immunomodulatory polypeptides, and Ig Fc polypeptides, are described above. In some cases, the nucleotide sequences encoding the first and the second polypeptides are operably linked to transcriptional control elements. In some cases, the transcriptional control element is a promoter that is functional in a eukaryotic cell. In some cases, the nucleic acids are present in separate expression vectors.

### Nucleic Acid Encoding Two or More Polypeptides Present in a Multimeric Polypeptide

[0596] The present disclosure provides a nucleic acid comprising nucleotide sequences encoding at least the first polypeptide and the second polypeptide of a TMMP of the present disclosure. In some cases, where a TMMP of the present disclosure includes a first, second, and third polypeptide, the nucleic acid includes a nucleotide sequence encoding the first, second, and third polypeptides. In some cases, the nucleotide sequences encoding the first polypeptide and the second polypeptide of a TMMP of the present disclosure includes a proteolytically cleavable linker interposed between the nucleotide sequence encoding the first polypeptide and the nucleotide sequence encoding the second polypeptide. In some cases, the nucleotide sequences encoding the first polypeptide and the second polypeptide of a TMMP of the present disclosure includes an internal ribosome entry site (IRES) interposed between the nucleotide sequence encoding the first polypeptide and the nucleotide sequence encoding the second polypeptide. In some cases, the nucleotide sequences encoding the first polypeptide and the second polypeptide of a TMMP of the present disclosure includes a ribosome skipping signal (or cis-acting hydrolase element, CHYSEL) interposed between the nucleotide sequence encoding the first polypeptide and the nucleotide sequence encoding the second polypeptide. Examples of nucleic acids are described below, where a proteolytically cleavable linker is provided between nucleotide sequences encoding the first polypeptide and the second polypeptide of a TMMP of the present disclosure; in any of these embodiments, an IRES or a ribosome skipping signal can be used in place of the nucleotide sequence encoding the proteolytically cleavable linker.

[0597] In some cases, a first nucleic acid (e.g., a recombinant expression vector, an mRNA, a viral RNA, etc.) comprises a nucleotide sequence encoding a first polypeptide chain of a TMMP of the present disclosure; and a second nucleic acid (e.g., a recombinant expression vector, an mRNA, a viral RNA, etc.) comprises a nucleotide sequence encoding a second polypeptide chain of a TMMP of the present disclosure. In some cases, the nucleotide sequence encoding the first polypeptide, and the second nucleotide sequence encoding the second polypeptide, are each operably linked to transcriptional control elements, e.g., promoters, such as promoters that are functional in a eukaryotic cell, where the promoter can be a constitutive promoter or an inducible promoter.

[0598] The present disclosure provides a nucleic acid comprising a nucleotide sequence encoding a recombinant polypeptide, where the recombinant polypeptide comprises, in order from N-terminus to C-terminus: a) an epitope (e.g., a T-cell epitope); b) a first MHC polypeptide; c) an immunomodulatory polypeptide (e.g., a reduced-affinity variant as described above); d) a proteolytically cleavable linker; e) a second MHC polypeptide; and f) an immunoglobulin (Ig) Fc polypeptide. The present disclosure provides a nucleic acid comprising a nucleotide sequence encoding a recombinant polypeptide, where the recombinant polypeptide comprises, in order from N-terminus to C-terminus: a) a first leader peptide; b) the epitope; c) the first MHC polypeptide; d) the immunomodulatory polypeptide (e.g., a reduced-affinity variant as described above); e) the proteolytically cleavable linker; f) a second leader peptide; g) the second MHC polypeptide; and h) the Ig Fc polypeptide. The present disclosure provides a nucleic acid comprising a nucleotide sequence encoding a recombinant polypeptide, where the recombinant polypeptide comprises, in order from N-terminus to C-terminus: a) an epitope; b) a first MHC polypeptide; c) a proteolytically cleavable linker; d) an immunomodulatory polypeptide (e.g., a reduced-affinity variant as described above); e) a second MHC polypeptide; and f) an Ig Fc polypeptide. In some cases, the first leader peptide and the second leader peptide are a β2-M leader peptide. In some cases, the nucleotide sequence is operably linked to a transcriptional control element. In some cases, the transcriptional control element is a promoter that is functional in a eukaryotic cell.

[0599] Suitable MHC polypeptides are described above. In some cases, the first MHC polypeptide is a β2-microglobulin polypeptide; and wherein the second MHC polypeptide is an MHC class I heavy chain polypeptide. In some cases, the β2-microglobulin polypeptide comprises an amino acid sequence having at least 85% amino acid sequence identity to a β2M amino acid sequence depicted in FIG. 4. In some cases, the MHC class I heavy chain polypeptide is an HLA-A, HLA-B, HLA-C, HLA-E, HLA-F, HLA-G, HLA-K, or HLA-L heavy chain.

[0600] Suitable Fc polypeptides are described above. In some cases, the Ig Fc polypeptide is an IgG1 Fc polypeptide, an IgG2 Fc polypeptide, an IgG3 Fc polypeptide, an IgG4 Fc polypeptide, an IgA Fc polypeptide, or an IgM Fc polypeptide. In some cases, the Ig Fc polypeptide comprises an amino acid sequence having at least 85% amino acid sequence identity to an amino acid sequence depicted in FIGS. 3A-3G.

[0601] Suitable immunomodulatory polypeptides are described above.

[0602] Suitable proteolytically cleavable linkers are described above. In some cases, the proteolytically cleavable linker comprises an amino acid sequence selected from: a) LEVLFQGP (SEQ ID NO:556); b) ENLYTQS (SEQ ID NO:557); c) DDDDK (SEQ ID NO:558); d) LVPR (SEQ ID NO:559); and e) GSGATNFSLLKQAGDVEENPGP (SEQ ID NO:560).

[0603] In some cases, a linker between the epitope and the first MHC polypeptide comprises a first Cys residue, and the second MHC polypeptide comprises an amino acid substitution to provide a second Cys residue, such that the first and the second Cys residues provide for a disulfide linkage between the linker and the second MHC polypeptide. In some cases, first MHC polypeptide comprises an amino acid substitution to provide a first Cys residue, and the second MHC polypeptide comprises an amino acid substitution to provide a second Cys residue, such that the first Cys residue and the second Cys residue provide for a disulfide linkage between the first MHC polypeptide and the second MHC polypeptide.

### Recombinant Expression Vectors

[0604] The present disclosure provides recombinant expression vectors comprising nucleic acids of the present disclosure. In some cases, the recombinant expression vector is a non-viral vector. In some cases, the recombinant expression vector is a viral construct, e.g., a recombinant adeno-associated virus construct (see, e.g., U.S. Pat. No. 7,078,387), a recombinant adenoviral construct, a recombinant lentiviral construct, a recombinant retroviral construct, a non-integrating viral vector, etc.

[0605] Suitable expression vectors include, but are not limited to, viral vectors (e.g. viral vectors based on vaccinia virus; poliovirus; adenovirus (see, e.g., Li et al., Invest Opthalmol Vis Sci 35:2543 2549, 1994; Borras et al., Gene Ther 6:515 524, 1999; Li and Davidson, PNAS 92:7700 7704, 1995; Sakamoto et al., H Gene Ther 5:1088 1097, 1999; WO 94/12649, WO 93/03769; WO 93/19191; WO 94/28938; WO 95/11984 and WO 95/00655); adeno-associated virus (see, e.g., Ali et al., Hum Gene Ther 9:81 86, 1998, Flannery et al., PNAS 94:6916 6921, 1997; Bennett et al., Invest Opthalmol Vis Sci 38:2857 2863, 1997; Jomary et al., Gene Ther 4:683 690, 1997, Rolling et al., Hum Gene Ther 10:641 648, 1999; Ali et al., Hum Mol Genet 5:591 594, 1996; Srivastava in WO 93/09239, Samulski et al., J. Vir. (1989) 63:3822-3828; Mendelson et al., Virol. (1988) 166:154-165; and Flotte et al., PNAS (1993) 90:10613-10617); SV40; herpes simplex virus; human immunodeficiency virus (see, e.g., Miyoshi et al., PNAS 94:10319 23, 1997; Takahashi et al., J Virol 73:7812 7816, 1999); a retroviral vector (e.g., Murine Leukemia Virus, spleen necrosis virus, and vectors derived from retroviruses such as Rous Sarcoma Virus, Harvey Sarcoma Virus, avian leukosis virus, a lentivirus, human immunodeficiency virus, myeloproliferative sarcoma virus, and mammary tumor virus); and the like.

[0606] Numerous suitable expression vectors are known to those of skill in the art, and many are commercially available. The following vectors are provided by way of example; for eukaryotic host cells: pXT1, pSG5 (Stratagene), pSVK3, pBPV, pMSG, and pSVLSV40 (Pharmacia). However, any other vector may be used so long as it is compatible with the host cell.

[0607] Depending on the host/vector system utilized, any of a number of suitable transcription and translation control elements, including constitutive and inducible promoters, transcription enhancer elements, transcription terminators, etc. may be used in the expression vector (see e.g., Bitter et al. (1987) Methods in Enzymology, 153:516-544).

[0608] In some cases, a nucleotide sequence encoding a DNA-targeting RNA and/or a site-directed modifying polypeptide is operably linked to a control element, e.g., a transcriptional control element, such as a promoter. The transcriptional control element may be functional in either a eukaryotic cell, e.g., a mammalian cell; or a prokaryotic cell (e.g., bacterial or archaeal cell). In some cases, a nucleotide sequence encoding a DNA-targeting RNA and/or a site-directed modifying polypeptide is operably linked to multiple control elements that allow expression of the nucleotide sequence encoding a DNA-targeting RNA and/or a site-directed modifying polypeptide in both prokaryotic and eukaryotic cells.

[0609] Non-limiting examples of suitable eukaryotic promoters (promoters functional in a eukaryotic cell) include those from cytomegalovirus (CMV) immediate early, herpes simplex virus (HSV) thymidine kinase, early and late SV40, long terminal repeats (LTRs) from retrovirus, and mouse metallothionein-I. Selection of the appropriate vector and promoter is well within the level of ordinary skill in the art. The expression vector may also contain a ribosome binding site for translation initiation and a transcription terminator. The expression vector may also include appropriate sequences for amplifying expression.

### Genetically Modified Host Cells

[0610] The present disclosure provides a genetically modified host cell, where the host cell is genetically modified with a nucleic acid ossf the present disclosure.

[0611] Suitable host cells include eukaryotic cells, such as yeast cells, insect cells, and mammalian cells. In some cases, the host cell is a cell of a mammalian cell line. Suitable mammalian cell lines include human cell lines, non-human primate cell lines, rodent (e.g., mouse, rat) cell lines, and the like. Suitable mammalian cell lines include, but are not limited to, HeLa cells (e.g., American Type Culture Collection (ATCC) No. CCL-2), CHO cells (e.g., ATCC Nos. CRL9618, CCL61, CRL9096), 293 cells (e.g., ATCC No. CRL-1573), Vero cells, NIH 3T3 cells (e.g., ATCC No. CRL-1658), Huh-7 cells, BHK cells (e.g., ATCC No. CCL10), PC12 cells (ATCC No. CRL1721), COS cells, COS-7 cells (ATCC No. CRL1651), RAT1 cells, mouse L cells (ATCC No. CCLI.3), human embryonic kidney (HEK) cells (ATCC No. CRL1573), HLHepG2 cells, and the like.

[0612] In some cases, the host cell is a mammalian cell that has been genetically modified such that it does not synthesize endogenous MHC β2-M.

[0613] In some cases, the host cell is a mammalian cell that has been genetically modified such that it does not synthesize endogenous MHC Class I heavy chain. In some cases, the host cell is a mammalian cell that has been genetically modified such that it does not synthesize endogenous MHC β2-M and such that it does not synthesize endogenous MHC Class I heavy chain.

### Compositions

[0614] The present disclosure provides compositions, including pharmaceutical compositions, comprising a TMMP (synTac) of the present disclosure. The present disclosure provides compositions, including pharmaceutical compositions, comprising a TMMP of the present disclosure. The present disclosure provides compositions, including pharmaceutical compositions, comprising a nucleic acid or a recombinant expression vector of the present disclosure.

### Compositions Comprising a Multimeric Polypeptide

[0615] A composition of the present disclosure can comprise, in addition to a TMMP of the present disclosure, one or more of: a salt, e.g., NaCl, MgCl₂, KCl, MgSO₄, etc.; a buffering agent, e.g., a Tris buffer, N-(2-Hydroxyethyl)piperazine-N′-(2-ethanesulfonic acid) (HEPES), 2-(N-Morpholino)ethanesulfonic acid (MES), 2-(N-Morpholino)ethanesulfonic acid sodium salt (MES), 3-(N-Morpholino)propanesulfonic acid (MOPS), N-tris[Hydroxymethyl]methyl-3-aminopropanesulfonic acid (TAPS), etc.; a solubilizing agent; a detergent, e.g., a non-ionic detergent such as Tween-20, etc.; a protease inhibitor; glycerol; and the like.

[0616] The composition may comprise a pharmaceutically acceptable excipient, a variety of which are known in the art and need not be discussed in detail herein. Pharmaceutically acceptable excipients have been amply described in a variety of publications, including, for example, “Remington: The Science and Practice of Pharmacy”, 19^{th} Ed. (1995), or latest edition, Mack Publishing Co; A. Gennaro (2000) “Remington: The Science and Practice of Pharmacy”, 20th edition, Lippincott, Williams, & Wilkins; Pharmaceutical Dosage Forms and Drug Delivery Systems (1999) H. C. Ansel et al., eds 7^{th} ed., Lippincott, Williams, & Wilkins; and Handbook of Pharmaceutical Excipients (2000) A. H. Kibbe et al., eds., 3^{rd} ed. Amer. Pharmaceutical Assoc.

[0617] A pharmaceutical composition can comprise a TMMP of the present disclosure, and a pharmaceutically acceptable excipient. In some cases, a subject pharmaceutical composition will be suitable for administration to a subject, e.g., will be sterile. For example, in some cases, a subject pharmaceutical composition will be suitable for administration to a human subject, e.g., where the composition is sterile and is free of detectable pyrogens and/or other toxins.

[0618] The protein compositions may comprise other components, such as pharmaceutical grades of mannitol, lactose, starch, magnesium stearate, sodium saccharin, talcum, cellulose, glucose, sucrose, magnesium, carbonate, and the like. The compositions may contain pharmaceutically acceptable auxiliary substances as required to approximate physiological conditions such as pH adjusting and buffering agents, toxicity adjusting agents and the like, for example, sodium acetate, sodium chloride, potassium chloride, calcium chloride, sodium lactate, hydrochloride, sulfate salts, solvates (e.g., mixed ionic salts, water, organics), hydrates (e.g., water), and the like.

[0619] For example, compositions may include aqueous solution, powder form, granules, tablets, pills, suppositories, capsules, suspensions, sprays, and the like. The composition may be formulated according to the various routes of administration described below.

[0620] Where a TMMP of the present disclosure is administered as an injectable (e.g. subcutaneously, intraperitoneally, intramuscularly, and/or intravenously) directly into a tissue, a formulation can be provided as a ready-to-use dosage form, or as non-aqueous form (e.g. a reconstitutable storage-stable powder) or aqueous form, such as liquid composed of pharmaceutically acceptable carriers and excipients. The protein-containing formulations may also be provided so as to enhance serum half-life of the TMMP following administration. For example, the TMMP may be provided in a liposome formulation, prepared as a colloid, or other conventional techniques for extending serum half-life. A variety of methods are available for preparing liposomes, as described in, e.g., Szoka et al. 1980 Ann. Rev. Biophys. Bioeng. 9:467, U.S. Pat. Nos. 4,235,871, 4,501,728 and 4,837,028. The preparations may also be provided in controlled release or slow-release forms.

[0621] Other examples of formulations suitable for parenteral administration include isotonic sterile injection solutions, anti-oxidants, bacteriostats, and solutes that render the formulation isotonic with the blood of the intended recipient, suspending agents, solubilizers, thickening agents, stabilizers, and preservatives. For example, a subject pharmaceutical composition can be present in a container, e.g., a sterile container, such as a syringe. The formulations can be presented in unit-dose or multi-dose sealed containers, such as ampules and vials, and can be stored in a freeze-dried (lyophilized) condition requiring only the addition of the sterile liquid excipient, for example, water, for injections, immediately prior to use. Extemporaneous injection solutions and suspensions can be prepared from sterile powders, granules, and tablets.

[0622] The concentration of a TMMP of the present disclosure in a formulation can vary widely (e.g., from less than about 0.1%, usually at or at least about 2% to as much as 20% to 50% or more by weight) and will usually be selected primarily based on fluid volumes, viscosities, and patient-based factors in accordance with the particular mode of administration selected and the patient's needs.

[0623] The present disclosure provides a container comprising a composition of the present disclosure, e.g., a liquid composition. The container can be, e.g., a syringe, an ampoule, and the like. In some cases, the container is sterile. In some cases, both the container and the composition are sterile.

[0624] The present disclosure provides compositions, including pharmaceutical compositions, comprising a TMMP of the present disclosure. A composition can comprise: a) a TMMP of the present disclosure; and b) an excipient, as described above. In some cases, the excipient is a pharmaceutically acceptable excipient.

[0625] In some cases, a TMMP of the present disclosure is present in a liquid composition. Thus, the present disclosure provides compositions (e.g., liquid compositions, including pharmaceutical compositions) comprising a TMMP of the present disclosure. In some cases, a composition of the present disclosure comprises: a) a TMMP of the present disclosure; and b) saline (e.g., 0.9% NaCl). In some cases, the composition is sterile. In some cases, the composition is suitable for administration to a human subject, e.g., where the composition is sterile and is free of detectable pyrogens and/or other toxins. Thus, the present disclosure provides a composition comprising: a) a TMMP of the present disclosure; and b) saline (e.g., 0.9% NaCl), where the composition is sterile and is free of detectable pyrogens and/or other toxins.

### Compositions Comprising a Nucleic Acid or a Recombinant Expression Vector

[0626] The present disclosure provides compositions, e.g., pharmaceutical compositions, comprising a nucleic acid or a recombinant expression vector of the present disclosure. A wide variety of pharmaceutically acceptable excipients is known in the art and need not be discussed in detail herein. Pharmaceutically acceptable excipients have been amply described in a variety of publications, including, for example, A. Gennaro (2000) “Remington: The Science and Practice of Pharmacy”, 20th edition, Lippincott, Williams, & Wilkins; Pharmaceutical Dosage Forms and Drug Delivery Systems (1999) H. C. Ansel et al., eds 7^{th} ed., Lippincott, Williams, & Wilkins; and Handbook of Pharmaceutical Excipients (2000) A. H. Kibbe et al., eds., 3^{rd} ed. Amer. Pharmaceutical Assoc.

[0627] A composition of the present disclosure can include: a) one or more nucleic acids or one or more recombinant expression vectors comprising nucleotide sequences encoding a TMMP; and b) one or more of: a buffer, a surfactant, an antioxidant, a hydrophilic polymer, a dextrin, a chelating agent, a suspending agent, a solubilizer, a thickening agent, a stabilizer, a bacteriostatic agent, a wetting agent, and a preservative. Suitable buffers include, but are not limited to, (such as N,N-bis(2-hydroxyethyl)-2-aminoethanesulfonic acid (BES), bis(2-hydroxyethyl)amino-tris(hydroxymethyl)methane (BIS-Tris), N-(2-hydroxyethyl)piperazine-N′3-propanesulfonic acid (EPPS or HEPPS), glycylglycine, N-2-hydroxyehtylpiperazine-N′-2-ethanesulfonic acid (HEPES), 3-(N-morpholino)propane sulfonic acid (MOPS), piperazine-N,N′-bis(2-ethane-sulfonic acid) (PIPES), sodium bicarbonate, 3-(N-tris(hydroxymethyl)-methyl-amino)-2-hydroxy-propanesulfonic acid) TAPSO, (N-tris(hydroxymethyl)methyl-2-aminoethanesulfonic acid (TES), N-tris(hydroxymethyl)methyl-glycine (Tricine), tris(hydroxymethyl)-aminomethane (Tris), etc.). Suitable salts include, e.g., NaCl, MgCl₂, KCl, MgSO₄, etc.

[0628] A pharmaceutical formulation of the present disclosure can include a nucleic acid or recombinant expression vector of the present disclosure in an amount of from about 0.001% to about 90% (w/w). In the description of formulations, below, “subject nucleic acid or recombinant expression vector” will be understood to include a nucleic acid or recombinant expression vector of the present disclosure. For example, in some cases, a subject formulation comprises a nucleic acid or recombinant expression vector of the present disclosure.

[0629] A subject nucleic acid or recombinant expression vector can be admixed, encapsulated, conjugated or otherwise associated with other compounds or mixtures of compounds; such compounds can include, e.g., liposomes or receptor-targeted molecules. A subject nucleic acid or recombinant expression vector can be combined in a formulation with one or more components that assist in uptake, distribution and/or absorption.

[0630] A subject nucleic acid or recombinant expression vector composition can be formulated into any of many possible dosage forms such as, but not limited to, tablets, capsules, gel capsules, liquid syrups, soft gels, suppositories, and enemas. A subject nucleic acid or recombinant expression vector composition can also be formulated as suspensions in aqueous, non-aqueous or mixed media. Aqueous suspensions may further contain substances which increase the viscosity of the suspension including, for example, sodium carboxymethylcellulose, sorbitol and/or dextran. The suspension may also contain stabilizers.

[0631] A formulation comprising a subject nucleic acid or recombinant expression vector can be a liposomal formulation. As used herein, the term “liposome” means a vesicle composed of amphiphilic lipids arranged in a spherical bilayer or bilayers. Liposomes are unilamellar or multilamellar vesicles which have a membrane formed from a lipophilic material and an aqueous interior that contains the composition to be delivered. Cationic liposomes are positively charged liposomes that can interact with negatively charged DNA molecules to form a stable complex. Liposomes that are pH sensitive or negatively charged are believed to entrap DNA rather than complex with it. Both cationic and noncationic liposomes can be used to deliver a subject nucleic acid or recombinant expression vector.

[0632] Liposomes also include “sterically stabilized” liposomes, a term which, as used herein, refers to liposomes comprising one or more specialized lipids that, when incorporated into liposomes, result in enhanced circulation lifetimes relative to liposomes lacking such specialized lipids. Examples of sterically stabilized liposomes are those in which part of the vesicle-forming lipid portion of the liposome comprises one or more glycolipids or is derivatized with one or more hydrophilic polymers, such as a polyethylene glycol (PEG) moiety. Liposomes and their uses are further described in U.S. Pat. No. 6,287,860, which is incorporated herein by reference in its entirety.

[0633] The formulations and compositions of the present disclosure may also include surfactants. The use of surfactants in drug products, formulations and in emulsions is well known in the art. Surfactants and their uses are further described in U.S. Pat. No. 6,287,860.

[0634] In one embodiment, various penetration enhancers are included, to effect the efficient delivery of nucleic acids. In addition to aiding the diffusion of non-lipophilic drugs across cell membranes, penetration enhancers also enhance the permeability of lipophilic drugs. Penetration enhancers may be classified as belonging to one of five broad categories, i.e., surfactants, fatty acids, bile salts, chelating agents, and non-chelating non-surfactants. Penetration enhancers and their uses are further described in U.S. Pat. No. 6,287,860, which is incorporated herein by reference in its entirety.

[0635] Compositions and formulations for oral administration include powders or granules, microparticulates, nanoparticulates, suspensions or solutions in water or non-aqueous media, capsules, gel capsules, sachets, tablets, or minitablets. Thickeners, flavoring agents, diluents, emulsifiers, dispersing aids or binders may be desirable. Suitable oral formulations include those in which a subject antisense nucleic acid is administered in conjunction with one or more penetration enhancers surfactants and chelators. Suitable surfactants include, but are not limited to, fatty acids and/or esters or salts thereof, bile acids and/or salts thereof. Suitable bile acids/salts and fatty acids and their uses are further described in U.S. Pat. No. 6,287,860. Also suitable are combinations of penetration enhancers, for example, fatty acids/salts in combination with bile acids/salts. An exemplary suitable combination is the sodium salt of lauric acid, capric acid, and UDCA. Further penetration enhancers include, but are not limited to, polyoxyethylene-9-lauryl ether, and polyoxyethylene-20-cetyl ether. Suitable penetration enhancers also include propylene glycol, dimethylsulfoxide, triethanoiamine, N,N-dimethylacetamide, N,N-dimethylformamide, 2-pyrrolidone and derivatives thereof, tetrahydrofurfuryl alcohol, and AZONE™.

### Methods of Modulating T Cell Activity

[0636] The present disclosure provides a method of selectively modulating the activity of an epitope-specific T cell (e.g., a T cell specific for a MUC1 epitope), the method comprising contacting the T cell with a TMMP of the present disclosure, where contacting the T cell with a TMMP of the present disclosure selectively modulates the activity of the epitope-specific T cell. In some cases, the contacting occurs in vitro. In some cases, the contacting occurs in vivo. In some cases, the contacting occurs ex vivo.

[0637] In some cases, e.g., where the target T cell is a CD8⁺ T cell, the TMMP comprises Class I MHC polypeptides (e.g., β2-microglobulin and Class I MHC heavy chain).

[0638] Where a TMMP of the present disclosure includes an immunomodulatory polypeptide that is an activating polypeptide, contacting the T cell with the TMMP activates the epitope-specific T cell. In some instances, the epitope-specific T cell is a T cell that is specific for an epitope present on a cancer cell, and contacting the epitope-specific T cell with the TMMP increases cytotoxic activity of the T cell toward the cancer cell. In some instances, the epitope-specific T cell is a T cell that is specific for an epitope present on a cancer cell, and contacting the epitope-specific T cell with the TMMP increases the number of the epitope-specific T cells.

[0639] The present disclosure provides a method of modulating an immune response in an individual, the method comprising administering to the individual an effective amount of a TMMP of the present disclosure. Administering the TMMP induces an epitope-specific T cell response (e.g., cancer epitope-specific T-cell response; a virus epitope-specific) and an epitope-non-specific T cell response, where the ratio of the epitope-specific T cell response to the epitope-non-specific T cell response is at least 2:1. In some cases, the ratio of the epitope-specific T cell response to the epitope-non-specific T cell response is at least 5:1. In some cases, the ratio of the epitope-specific T cell response to the epitope-non-specific T cell response is at least 10:1. In some cases, the ratio of the epitope-specific T cell response to the epitope-non-specific T cell response is at least 25:1. In some cases, the ratio of the epitope-specific T cell response to the epitope-non-specific T cell response is at least 50:1. In some cases, the ratio of the epitope-specific T cell response to the epitope-non-specific T cell response is at least 100:1. In some cases, the individual is a human. In some cases, the modulating increases a cytotoxic T-cell response to a cancer cell, e.g., a cancer cell expressing an antigen that displays the same epitope displayed by the peptide epitope present in the TMMP. In some cases, the administering is intravenous, subcutaneous, intramuscular, systemic, intralymphatic, distal to a treatment site, local, or at or near a treatment site.

[0640] The present disclosure provides a method of delivering a costimulatory (i.e., immunomodulatory) polypeptide selectively to target T cell, the method comprising contacting a mixed population of T cells with a TMMP of the present disclosure, where the mixed population of T cells comprises the target T cell and non-target T cells, where the target T cell is specific for the epitope present within the TMMP (e.g., where the target T cell is specific for the epitope present within the TMMP), and where the contacting step delivers the one or more costimulatory polypeptides (immunomodulatory polypeptides) present within the TMMP to the target T cell. In some cases, the population of T cells is in vitro. In some cases, the population of T cells is in vivo in an individual. In some cases, the method comprises administering the TMMP to the individual. In some case, the T cell is a cytotoxic T cell. In some cases, the mixed population of T cells is an in vitro population of mixed T cells obtained from an individual, and the contacting step results in activation and/or proliferation of the target T cell, generating a population of activated and/or proliferated target T cells; in some of these instances, the method further comprises administering the population of activated and/or proliferated target T cells to the individual.

[0641] The present disclosure provides a method of detecting, in a mixed population of T cells obtained from an individual, the presence of a target T cell that binds an epitope of interest (e.g., a cancer epitope, a virus epitope), the method comprising: a) contacting in vitro the mixed population of T cells with a TMMP of the present disclosure, wherein the TMMP comprises the epitope of interest (e.g., the cancer epitope, the virus epitope); and b) detecting activation and/or proliferation of T cells in response to said contacting, wherein activated and/or proliferated T cells indicates the presence of the target T cell.

### Treatment Methods

[0642] The present disclosure provides a method of treatment of an individual, the method comprising administering to the individual an amount of a TMMP of the present disclosure, or one or more nucleic acids encoding the TMMP, effective to treat the individual. Also provided is a TMMP of the present disclosure for use in a method of treatment of the human or animal body. In some cases, a treatment method of the present disclosure comprises administering to an individual in need thereof one or more recombinant expression vectors comprising nucleotide sequences encoding a TMMP of the present disclosure. In some cases, a treatment method of the present disclosure comprises administering to an individual in need thereof one or more mRNA molecules comprising nucleotide sequences encoding a TMMP of the present disclosure. In some cases, a treatment method of the present disclosure comprises administering to an individual in need thereof a TMMP of the present disclosure. Conditions that can be treated include, e.g., cancer, such as a cancer that overexpresses MUC1.

[0643] In some cases, a TMMP of the present disclosure, when administered to an individual in need thereof, induces both an epitope-specific T cell response and an epitope non-specific T cell response. In other words, in some cases, a TMMP of the present disclosure, when administered to an individual in need thereof, induces an epitope-specific T cell response by modulating the activity of a first T cell that displays both: i) a TCR specific for the epitope present in the TMMP; ii) a co-immunomodulatory polypeptide that binds to the immunomodulatory polypeptide present in the TMMP; and induces an epitope non-specific T cell response by modulating the activity of a second T cell that displays: i) a TCR specific for an epitope other than the epitope present in the TMMP; and ii) a co-immunomodulatory polypeptide that binds to the immunomodulatory polypeptide present in the TMMP. The ratio of the epitope-specific T cell response to the epitope-non-specific T cell response is at least 2:1, at least 5:1, at least 10:1, at least 15:1, at least 20:1, at least 25:1, at least 50:1, or at least 100:1. The ratio of the epitope-specific T cell response to the epitope-non-specific T cell response is from about 2:1 to about 5:1, from about 5:1 to about 10:1, from about 10:1 to about 15:1, from about 15:1 to about 20:1, from about 20:1 to about 25:1, from about 25:1 to about 50:1, or from about 50:1 to about 100:1, or more than 100:1. “Modulating the activity” of a T cell can include one or more of: i) activating a cytotoxic (e.g., CD8⁺) T cell; ii) inducing cytotoxic activity of a cytotoxic (e.g., CD8⁺) T cell; iii) inducing production and release of a cytotoxin (e.g., a perforin; a granzyme; a granulysin) by a cytotoxic (e.g., CD8⁺) T cell; iv) inhibiting activity of an autoreactive T cell; and the like.

[0644] The combination of the reduced affinity of the immunomodulatory polypeptide for its cognate co-immunomodulatory polypeptide, and the affinity of the epitope for a TCR, provides for enhanced selectivity of a TMMP of the present disclosure. Thus, for example, a TMMP of the present disclosure binds with higher avidity to a first T cell that displays both: i) a TCR specific for the epitope present in the TMMP; and ii) a co-immunomodulatory polypeptide that binds to the immunomodulatory polypeptide present in the TMMP, compared to the avidity to which it binds to a second T cell that displays: i) a TCR specific for an epitope other than the epitope present in the TMMP; and ii) a co-immunomodulatory polypeptide that binds to the immunomodulatory polypeptide present in the TMMP.

[0645] The present disclosure provides a method of selectively modulating the activity of an epitope-specific T cell in an individual, the method comprising administering to the individual an effective amount of a TMMP of the present disclosure, or one or more nucleic acids (e.g., expression vectors; mRNA; etc.) comprising nucleotide sequences encoding the TMMP, where the TMMP selectively modulates the activity of the epitope-specific T cell in the individual. Selectively modulating the activity of an epitope-specific T cell can treat a disease or disorder in the individual. Thus, the present disclosure provides a treatment method comprising administering to an individual in need thereof an effective amount of a TMMP of the present disclosure.

[0646] In some cases, the immunomodulatory polypeptide (“MOD”) is an activating polypeptide, and the TMMP activates the epitope-specific T cell. In some cases, the TMMP increases the activity of a T cell specific for the MUC1 epitope. In some cases, the MOD is an activating polypeptide, and the TMMP activates an epitope-specific T-cell (e.g., a T-cell specific for a MUC1 epitope). In some cases, the T cells are T-helper cells (CD4⁺ cells), cytotoxic T-cells (CD8⁺ cells), or NK-T-cells. In some cases, the epitope is a cancer epitope, and the TMMP increases the activity of a T-cell specific for a cancer cell expressing the MUC1 cancer epitope (e.g., T-helper cells (CD4⁺ cells), cytotoxic T-cells (CD8⁺ cells), and/or NK-T-cells). Activation of CD4⁺ T cells can include increasing proliferation of CD4⁺ T cells and/or inducing or enhancing release cytokines by CD4⁺ T cells. Activation of NK-T-cells and/or CD8+ cells can include: increasing proliferation of NK-T-cells and/or CD8+ cells; and/or inducing release of cytokines such as interferon γ by NK-T-cells and/or CD8+ cells.

[0647] A TMMP of the present disclosure can be administered to an individual in need thereof to treat a cancer in the individual, where the cancer expresses the MUC1 peptide present in the TMMP. For example, the cancer can be one in which the cancer cells over-express MUC1. The present disclosure provides a method of treating cancer in an individual, the method comprising administering to the individual an effective amount of a TMMP of the present disclosure, or one or more nucleic acids (e.g., expression vectors; mRNA; etc.) comprising nucleotide sequences encoding the TMMP, where the TMMP comprises a T-cell epitope that is a MUC1 epitope, and where the TMMP comprises a stimulatory immunomodulatory polypeptide. In some cases, an “effective amount” of a TMMP of the present disclosure is an amount that, when administered in one or more doses to an individual in need thereof, reduces the number of cancer cells in the individual. For example, in some cases, an “effective amount” of a TMMP of the present disclosure is an amount that, when administered in one or more doses to an individual in need thereof, reduces the number of cancer cells in the individual by at least 10%, at least 15%, at least 20%, at least 25%, at least 30%, at least 40%, at least 50%, at least 60%, at least 70%, at least 80%, at least 90%, or at least 95%, compared to the number of cancer cells in the individual before administration of the TMMP, or in the absence of administration with the TMMP. In some cases, an “effective amount” of a TMMP of the present disclosure is an amount that, when administered in one or more doses to an individual in need thereof, reduces the number of cancer cells in the individual to undetectable levels.

[0648] In some cases, an “effective amount” of a TMMP of the present disclosure is an amount that, when administered in one or more doses to an individual in need thereof, reduces the tumor mass in the individual. For example, in some cases, an “effective amount” of a TMMP of the present disclosure is an amount that, when administered in one or more doses to an individual in need thereof (an individual having a tumor), reduces the tumor mass in the individual by at least 10%, at least 15%, at least 20%, at least 25%, at least 30%, at least 40%, at least 50%, at least 60%, at least 70%, at least 80%, at least 90%, or at least 95%, compared to the tumor mass in the individual before administration of the TMMP, or in the absence of administration with the TMMP. In some cases, an “effective amount” of a TMMP of the present disclosure is an amount that, when administered in one or more doses to an individual in need thereof (an individual having a tumor), reduces the tumor volume in the individual. For example, in some cases, an “effective amount” of a TMMP of the present disclosure is an amount that, when administered in one or more doses to an individual in need thereof (an individual having a tumor), reduces the tumor volume in the individual by at least 10%, at least 15%, at least 20%, at least 25%, at least 30%, at least 40%, at least 50%, at least 60%, at least 70%, at least 80%, at least 90%, or at least 95%, compared to the tumor volume in the individual before administration of the TMMP, or in the absence of administration with the TMMP. In some cases, an “effective amount” of a TMMP of the present disclosure is an amount that, when administered in one or more doses to an individual in need thereof, increases survival time of the individual. For example, in some cases, an “effective amount” of a TMMP of the present disclosure is an amount that, when administered in one or more doses to an individual in need thereof, increases survival time of the individual by at least 1 month, at least 2 months, at least 3 months, from 3 months to 6 months, from 6 months to 1 year, from 1 year to 2 years, from 2 years to 5 years, from 5 years to 10 years, or more than 10 years, compared to the expected survival time of the individual in the absence of administration with the TMMP.

[0649] Cancers that can be treated with a method of the present disclosure include cancers in which the cancer cells overexpress MUC1, e.g., cancer cells that overexpress hypoglycosylated MUC1. Examples include adenocarcinomas and hematological malignancies. Examples of cancers that can be treated with a method of the present disclosure include multiple myeloma; B-cell lymphoma; breast cancer; lung cancer; ovarian carcinoma; pancreatic cancer; colorectal cancer; prostate cancer; renal cancer; acute myelogenous leukemia; mesothelioma; thyroid cancer; head and neck cancer; stomach chancer; urothelial cancer; cervical cancer; and ovarian endometrial cancer.

[0650] As noted above, in some cases, in carrying out a subject treatment method, a TMMP of the present disclosure is administered to an individual in need thereof, as the TMMP per se. In other instances, in carrying out a subject treatment method, one or more nucleic acids comprising nucleotide sequences encoding a TMMP of the present disclosure is/are administering to an individual in need thereof. Thus, in other instances, one or more nucleic acids of the present disclosure, e.g., one or more recombinant expression vectors of the present disclosure, is/are administered to an individual in need thereof.

### Formulations

[0651] Suitable formulations are described above, where suitable formulations include a pharmaceutically acceptable excipient. In some cases, a suitable formulation comprises: a) a TMMP of the present disclosure; and b) a pharmaceutically acceptable excipient. In some cases, a suitable formulation comprises: a) a nucleic acid comprising a nucleotide sequence encoding a TMMP of the present disclosure; and b) a pharmaceutically acceptable excipient; in some instances, the nucleic acid is an mRNA. In some cases, a suitable formulation comprises: a) a first nucleic acid comprising a nucleotide sequence encoding the first polypeptide of a TMMP of the present disclosure; b) a second nucleic acid comprising a nucleotide sequence encoding the second polypeptide of a TMMP of the present disclosure; and c) a pharmaceutically acceptable excipient. In some cases, a suitable formulation comprises: a) a recombinant expression vector comprising a nucleotide sequence encoding a TMMP of the present disclosure; and b) a pharmaceutically acceptable excipient. In some cases, a suitable formulation comprises: a) a first recombinant expression vector comprising a nucleotide sequence encoding the first polypeptide of a TMMP of the present disclosure; b) a second recombinant expression vector comprising a nucleotide sequence encoding the second polypeptide of a TMMP of the present disclosure; and c) a pharmaceutically acceptable excipient.

[0652] Suitable pharmaceutically acceptable excipients are described above.

### Dosages

[0653] A suitable dosage can be determined by an attending physician or other qualified medical personnel, based on various clinical factors. As is well known in the medical arts, dosages for any one patient depend upon many factors, including the patient's size, body surface area, age, the particular polypeptide or nucleic acid to be administered, sex of the patient, time, and route of administration, general health, and other drugs being administered concurrently. A TMMP of the present disclosure may be administered in amounts between 1 ng/kg body weight and 20 mg/kg body weight per dose, e.g. between 0.1 mg/kg body weight to 10 mg/kg body weight, e.g. between 0.5 mg/kg body weight to 5 mg/kg body weight; however, doses below or above this exemplary range are envisioned, especially considering the aforementioned factors. If the regimen is a continuous infusion, it can also be in the range of 1 μg to 10 mg per kilogram of body weight per minute. A TMMP of the present disclosure can be administered in an amount of from about 1 mg/kg body weight to 50 mg/kg body weight, e.g., from about 1 mg/kg body weight to about 5 mg/kg body weight, from about 5 mg/kg body weight to about 10 mg/kg body weight, from about 10 mg/kg body weight to about 15 mg/kg body weight, from about 15 mg/kg body weight to about 20 mg/kg body weight, from about 20 mg/kg body weight to about 25 mg/kg body weight, from about 25 mg/kg body weight to about 30 mg/kg body weight, from about 30 mg/kg body weight to about 35 mg/kg body weight, from about 35 mg/kg body weight to about 40 mg/kg body weight, or from about 40 mg/kg body weight to about 50 mg/kg body weight.

[0654] In some cases, a suitable dose of a TMMP of the present disclosure is from 0.01 μg to 100 g per kg of body weight, from 0.1 μg to 10 g per kg of body weight, from 1 μg to 1 g per kg of body weight, from 10 μg to 100 mg per kg of body weight, from 100 μg to 10 mg per kg of body weight, or from 100 μg to 1 mg per kg of body weight. Persons of ordinary skill in the art can easily estimate repetition rates for dosing based on measured residence times and concentrations of the administered agent in bodily fluids or tissues. Following successful treatment, it may be desirable to have the patient undergo maintenance therapy to prevent the recurrence of the disease state, wherein a TMMP of the present disclosure is administered in maintenance doses, ranging from 0.01 μg to 100 g per kg of body weight, from 0.1 μg to 10 g per kg of body weight, from 1 μg to 1 g per kg of body weight, from 10 μg to 100 mg per kg of body weight, from 100 μg to 10 mg per kg of body weight, or from 100 μg to 1 mg per kg of body weight.

[0655] Those of skill will readily appreciate that dose levels can vary as a function of the specific TMMP, the severity of the symptoms and the susceptibility of the subject to side effects. Preferred dosages for a given compound are readily determinable by those of skill in the art by a variety of means.

[0656] In some cases, multiple doses of a TMMP of the present disclosure, a nucleic acid of the present disclosure, or a recombinant expression vector of the present disclosure are administered. The frequency of administration of a TMMP of the present disclosure, a nucleic acid of the present disclosure, or a recombinant expression vector of the present disclosure can vary depending on any of a variety of factors, e.g., severity of the symptoms, etc. For example, in some cases, a TMMP of the present disclosure, a nucleic acid of the present disclosure, or a recombinant expression vector of the present disclosure is administered once per month, twice per month, three times per month, every other week (qow), once per week (qw), twice per week (biw), three times per week (tiw), four times per week, five times per week, six times per week, every other day (qod), daily (qd), twice a day (qid), or three times a day (tid).

[0657] The duration of administration of a TMMP of the present disclosure, a nucleic acid of the present disclosure, or a recombinant expression vector of the present disclosure, e.g., the period of time over which a TMMP of the present disclosure, a nucleic acid of the present disclosure, or a recombinant expression vector of the present disclosure is administered, can vary, depending on any of a variety of factors, e.g., patient response, etc. For example, a TMMP of the present disclosure, a nucleic acid of the present disclosure, or a recombinant expression vector of the present disclosure can be administered over a period of time ranging from about one day to about one week, from about two weeks to about four weeks, from about one month to about two months, from about two months to about four months, from about four months to about six months, from about six months to about eight months, from about eight months to about 1 year, from about 1 year to about 2 years, or from about 2 years to about 4 years, or more.

### Routes of Administration

[0658] An active agent (a TMMP of the present disclosure, a nucleic acid of the present disclosure, or a recombinant expression vector of the present disclosure) is administered to an individual using any available method and route suitable for drug delivery, including in vivo and ex vivo methods, as well as systemic and localized routes of administration.

[0659] Conventional and pharmaceutically acceptable routes of administration include intratumoral, peritumoral, intramuscular, intralymphatic, intratracheal, intracranial, subcutaneous, intradermal, topical application, intravenous, intraarterial, rectal, nasal, oral, and other enteral and parenteral routes of administration. Routes of administration may be combined, if desired, or adjusted depending upon the TMMP and/or the desired effect. A TMMP of the present disclosure, or a nucleic acid or recombinant expression vector of the present disclosure, can be administered in a single dose or in multiple doses.

[0660] In some cases, a TMMP of the present disclosure, a nucleic acid of the present disclosure, or a recombinant expression vector of the present disclosure is administered intravenously. In some cases, a TMMP of the present disclosure, a nucleic acid of the present disclosure, or a recombinant expression vector of the present disclosure is administered intramuscularly. In some cases, a TMMP of the present disclosure, a nucleic acid of the present disclosure, or a recombinant expression vector of the present disclosure is administered intralymphatically. In some cases, a TMMP of the present disclosure, a nucleic acid of the present disclosure, or a recombinant expression vector of the present disclosure is administered locally. In some cases, a TMMP of the present disclosure, a nucleic acid of the present disclosure, or a recombinant expression vector of the present disclosure is administered intratumorally. In some cases, a TMMP of the present disclosure, a nucleic acid of the present disclosure, or a recombinant expression vector of the present disclosure is administered peritumorally. In some cases, a TMMP of the present disclosure, a nucleic acid of the present disclosure, or a recombinant expression vector of the present disclosure is administered intracranially. In some cases, a TMMP of the present disclosure, a nucleic acid of the present disclosure, or a recombinant expression vector of the present disclosure is administered subcutaneously.

[0661] In some cases, a TMMP of the present disclosure is administered intravenously. In some cases, a TMMP of the present disclosure is administered intramuscularly. In some cases, a TMMP of the present disclosure is administered locally. In some cases, a TMMP the present disclosure is administered intratumorally. In some cases, a TMMP of the present disclosure is administered peritumorally. In some cases, a TMMP of the present disclosure is administered intracranially. In some cases, a TMMP is administered subcutaneously. In some cases, a TMMP of the present disclosure is administered intralymphatically.

[0662] A TMMP of the present disclosure, a nucleic acid of the present disclosure, or a recombinant expression vector of the present disclosure can be administered to a host using any available conventional methods and routes suitable for delivery of conventional drugs, including systemic or localized routes. In general, routes of administration contemplated for use in a method of the present disclosure include, but are not necessarily limited to, enteral, parenteral, and inhalational routes.

[0663] Parenteral routes of administration other than inhalation administration include, but are not necessarily limited to, topical, transdermal, subcutaneous, intramuscular, intraorbital, intracapsular, intraspinal, intrasternal, intratumoral, intralymphatic, peritumoral, and intravenous routes, i.e., any route of administration other than through the alimentary canal. Parenteral administration can be carried to effect systemic or local delivery of a TMMP of the present disclosure, a nucleic acid of the present disclosure, or a recombinant expression vector of the present disclosure. Where systemic delivery is desired, administration typically involves invasive or systemically absorbed topical or mucosal administration of pharmaceutical preparations.

### Subjects Suitable for Treatment

[0664] Subjects suitable for treatment with a method of the present disclosure include individuals who have cancer, including individuals who have been diagnosed as having cancer, individuals who have been treated for cancer but who failed to respond to the treatment, and individuals who have been treated for cancer and who initially responded but subsequently became refractory to the treatment. Subjects suitable for treatment with a method of the present disclosure include individuals having a cancer in which the cancer cells overexpress MUC1, e.g., cancer cells that overexpress hypoglycosylated MUC1. Subjects suitable for treatment with a method of the present disclosure include individuals having a cancer such as multiple myeloma; B-cell lymphoma; breast cancer; lung cancer; ovarian carcinoma; pancreatic cancer; colorectal cancer; prostate cancer; renal cancer; acute myelogenous leukemia; mesothelioma; thyroid cancer; head and neck cancer; stomach chancer; urothelial cancer; cervical cancer; and ovarian endometrial cancer.

### Examples of Non-Limiting Aspects of the Disclosure

### Aspects Set A

[0665] Aspects, including embodiments, of the present subject matter described above may be beneficial alone or in combination, with one or more other aspects or embodiments. Without limiting the foregoing description, certain non-limiting aspects of the disclosure numbered 1-51 are provided below. As will be apparent to those of skill in the art upon reading this disclosure, each of the individually numbered aspects may be used or combined with any of the preceding or following individually numbered aspects. This is intended to provide support for all such combinations of aspects and is not limited to combinations of aspects explicitly provided below:

[0666] Aspect 1. A T-cell modulatory multimeric polypeptide comprising: at least one heterodimer comprising: a) a first polypeptide comprising: i) a MUC1 peptide comprising an epitope present in a mucin-1 (MUC1) antigen expressed on a cancer cell, wherein the MUC1 peptide has a length of at least 4 amino acids; and ii) first major histocompatibility complex (MHC) polypeptide; b) a second polypeptide comprising a second MHC polypeptide, and c) at least one immunomodulatory polypeptide, wherein the first and/or the second polypeptide comprises the immunomodulatory polypeptide.

[0667] Aspect 2. A T-cell modulatory multimeric polypeptide of claim 1, wherein at least one of the one or more immunomodulatory domains is a variant immunomodulatory polypeptide that exhibits reduced affinity to a cognate co-immunomodulatory polypeptide compared to the affinity of a corresponding wild-type immunomodulatory polypeptide for the cognate co-immunomodulatory polypeptide, and wherein the MUC1 peptide and the first MHC polypeptide form a complex (MUC1 peptide/MHC complex) that binds to a T-cell receptor (TCR) on a T cell with an affinity of at least 10⁻⁷ M, such that:

[0668] i) the T-cell modulatory multimeric polypeptide binds to a first T cell with an affinity that is at least 25% higher than the affinity with which the T-cell modulatory multimeric polypeptide binds a second T cell, wherein the first T cell expresses on its surface the cognate co-immunomodulatory polypeptide and a TCR that binds the MUC1 peptide/MHC complex with an affinity of at least 10⁻⁷ M, and wherein the second T cell expresses on its surface the cognate co-immunomodulatory polypeptide but does not express on its surface a TCR that binds the MUC1 peptide/MHC complex with an affinity of at least 10⁻⁷ M; and/or

[0669] ii) the ratio of the binding affinity of a control T-cell modulatory multimeric polypeptide, wherein the control comprises a wild-type immunomodulatory polypeptide, to a cognate co-immunomodulatory polypeptide to the binding affinity of the T-cell modulatory multimeric polypeptide comprising a variant of the wild-type immunomodulatory polypeptide to the cognate co-immunomodulatory polypeptide, when measured by bio-layer interferometry, is in a range of from 1.5:1 to 106:1.

[0670] Aspect 3. A T-cell modulatory multimeric polypeptide of aspect 2, wherein: a) the T-cell modulatory multimeric polypeptide binds to the first T cell with an affinity that is at least 50%, at least 2-fold, at least 5-fold, or at least 10-fold higher than the affinity with which it binds the second T cell; and/or b) the variant immunomodulatory polypeptide binds the co-immunomodulatory polypeptide with an affinity of from about 10⁻⁴ M to about 10⁻⁷ M, from about 10⁻⁴ M to about 10⁻⁶ M, or from about 10⁻⁴ M to about 10⁻⁵ M; and/or c) wherein the ratio of the binding affinity of a control T-cell modulatory multimeric polypeptide, wherein the control comprises a wild-type immunomodulatory polypeptide, to a cognate co-immunomodulatory polypeptide to the binding affinity of the T-cell modulatory multimeric polypeptide comprising a variant of the wild-type immunomodulatory polypeptide to the cognate co-immunomodulatory polypeptide, when measured by bio-layer interferometry, is at least 10:1, at least 50:1, at least 10²:1, or at least 10³:1.

[0671] Aspect 4. A T-cell modulatory multimeric polypeptide of any one of aspects 1-3, wherein the first or the second polypeptide comprises an immunoglobulin (Ig) Fc polypeptide.

[0672] Aspect 5. A T-cell modulatory multimeric polypeptide of aspect 4, wherein the Ig Fc polypeptide is an IgG1 Fc polypeptide.

[0673] Aspect 6. A T-cell modulatory multimeric polypeptide of aspect 5, wherein IgG1 Fc polypeptide comprises one or more amino acid substitutions selected from N297A, L234A, L235A, L234F, L235E, and P331S.

[0674] Aspect 7. A T-cell modulatory multimeric polypeptide of any one of aspects 1-6, wherein:

[0675] a1) the first polypeptide comprises, in order from N-terminus to C-terminus: i) the MUC1 peptide; ii) the first MHC polypeptide; and iii) at least one immunomodulatory polypeptide; and b1) the second polypeptide comprises, in order from N-terminus to C-terminus: i) the second MHC polypeptide; and ii) an immunoglobulin (Ig) Fc polypeptide; or

[0676] a2) the first polypeptide comprises, in order from N-terminus to C-terminus: i) the MUC1 peptide; and ii) the first MHC polypeptide; and b2) the second polypeptide comprises, in order from N-terminus to C-terminus: i) at least one immunomodulatory polypeptide; ii) the second MHC polypeptide; and iii) an Ig Fc polypeptide; or

[0677] a3) the first polypeptide comprises, in order from N-terminus to C-terminus: i) the MUC1 peptide; and ii) the first MHC polypeptide; and b3) the second polypeptide comprises, in order from N-terminus to C-terminus: i) the second MHC polypeptide; and ii) an Ig Fc polypeptide; and iii) at least one immunomodulatory polypeptide; or

[0678] a4) the first polypeptide comprises, in order from N-terminus to C-terminus: i) the MUC1 peptide; and ii) the first MHC polypeptide; and b4) the second polypeptide comprises, in order from N-terminus to C-terminus: i) the second MHC polypeptide; and ii) at least one immunomodulatory polypeptide; or

[0679] a5) the first polypeptide comprises, in order from N-terminus to C-terminus: i) the MUC1 peptide; and ii) the first MHC polypeptide; and b5) a second polypeptide comprises, in order from N-terminus to C-terminus: i) at least one immunomodulatory polypeptide; and ii) the second MHC polypeptide; or

[0680] a6) the first polypeptide comprises, in order from N-terminus to C-terminus: i) the MUC1 peptide; ii) the first MHC polypeptide; and iii) at least one immunomodulatory polypeptide; and b6) the second polypeptide comprises: i) the second MHC polypeptide.

[0681] Aspect 8. A T-cell modulatory multimeric polypeptide of any one of aspects 1-7, wherein the first polypeptide comprises a peptide linker between the MUC1 peptide and the first MHC polypeptide and/or wherein the second polypeptide comprises a peptide linker between the immunomodulatory polypeptide and the second MHC polypeptide.

[0682] Aspect 9. A T-cell modulatory multimeric polypeptide of aspect 8, wherein the peptide linker comprises the amino acid sequence (GGGGS)n (SEQ ID NO: 254), where n is an integer from 1 to 10.

[0683] Aspect 10. A T-cell modulatory multimeric polypeptide of any one of aspects 1-9, wherein the first MHC polypeptide is a β2-microglobulin polypeptide; and wherein the second MHC polypeptide is an MHC class I heavy chain polypeptide.

[0684] Aspect 11. A T-cell modulatory multimeric polypeptide of any one of aspects 1-10, wherein the at least one immunomodulatory polypeptide is selected from the group consisting of a cytokine, a 4-1BBL polypeptide, a B7-1 polypeptide; a B7-2 polypeptide, an ICOS-L polypeptide, an OX-40L polypeptide, a CD80 polypeptide, a CD86 polypeptide, a PD-L1 polypeptide, a FasL polypeptide, a PD-L2 polypeptide, and combinations thereof.

[0685] Aspect 12. A T-cell modulatory multimeric polypeptide of any one of aspects 1-11, wherein the at least one immunomodulatory polypeptide is an IL-2 polypeptide.

[0686] Aspect 13. A T-cell modulatory multimeric polypeptide of any one of aspects 1-12, wherein the multimeric polypeptide comprises at least two immunomodulatory polypeptides, and wherein at least two of the immunomodulatory polypeptides are the same.

[0687] Aspect 14. A T-cell modulatory multimeric polypeptide of aspect 13, wherein the 2 or more immunomodulatory polypeptides are in tandem.

[0688] Aspect 15. A T-cell modulatory multimeric polypeptide of any one of aspects 1-14, wherein the first polypeptide and the second polypeptide are covalently linked to one another.

[0689] Aspect 16. A T-cell modulatory multimeric polypeptide of aspect 15, wherein the covalent linkage is via a disulfide bond.

[0690] Aspect 17. A T-cell modulatory multimeric polypeptide of aspect 16, wherein the β2M polypeptide and the MHC heavy chain polypeptide are joined by a disulfide bond that joins a Cys residue in the β2M polypeptide and a Cys residue in the MHC heavy chain polypeptide.

[0691] Aspect 18. A T-cell modulatory multimeric polypeptide of aspect 17, wherein a Cys at amino acid residue 12 of the β2M polypeptide is disulfide bonded to a Cys at amino acid residue 236 of the MHC heavy chain polypeptide.

[0692] Aspect 19. A T-cell modulatory multimeric polypeptide of aspect 17, wherein the first polypeptide chain comprises a linker between the MUC1 peptide and the β2M polypeptide, and wherein the disulfide bond links a Cys present in the linker with a Cys of the MHC heavy chain polypeptide.

[0693] Aspect 20. A T-cell modulatory multimeric polypeptide of aspect 17, wherein the first polypeptide chain comprises a linker between the peptide epitope and the β2M polypeptide, and wherein the disulfide bond links a Cys substituted for Gly2 in the linker with a Cys substituted for Tyr84 of the MHC heavy chain polypeptide.

[0694] Aspect 21. A T-cell modulatory multimeric polypeptide of any one of aspects 1-14, wherein the first and the second polypeptides are covalently linked to one another via at least 2 disulfide bonds.

[0695] Aspect 22. The T-cell modulatory multimeric polypeptide of aspect 21, wherein: a) a first disulfide bond is between: i) a Cys present in a linker between the peptide epitope and the first MHC class I polypeptide, wherein the first MHC class I polypeptide is a β2M polypeptide; and ii) a Cys residue introduced via a Y84C substitution in the second MHC class I polypeptide, wherein the second MHC class I polypeptide is an MHC Class I heavy chain polypeptide; and b) a second disulfide bond is between: i) a Cys residue introduced into the β2M polypeptide via an R12C substitution; and ii) a Cys residue introduced into the MHC Class I heavy chain polypeptide via an A236C substitution.

[0696] Aspect 23. A T-cell modulatory multimeric polypeptide of aspect 22, wherein the linker comprises the amino acid sequence GCGGS (SEQ ID NO:139).

[0697] Aspect 24. A T-cell modulatory multimeric polypeptide of aspect 22, wherein the linker comprises the amino acid sequence GCGGS(GGGGS)n (SEQ ID NO: 140), where n is an integer from 1 to 10.

[0698] Aspect 25. A T-cell modulatory multimeric polypeptide of any one of aspects 1-24, wherein the MUC1 peptide is a peptide of at least 4 amino acids in length, e.g., from 4 amino acids to about 25 amino acids (e.g., 4 amino acids (aa), 5 aa, 6 aa, 7 aa, 8 aa, 9 aa, 10 aa, 11 aa, 12 aa, 13 aa, 14 aa, 15 aa, 16 aa, 17 aa, 18 aa, 19 aa, 20 aa, 21 aa, 22 aa, 23 aa, 24 aa, or 25 aa, including within a range of from 4 to 20 amino acids, from 6 to 18 amino acids, from 8 to 15 amino acids, from 8 to 12 amino acids, from 5 to 10 amino acids, from 10 to 20 amino acids, and from 15 to 25 amino acids in length).

[0699] Aspect 26. A T-cell modulatory multimeric polypeptide of any one of aspects 1-25, wherein the first or the second MHC polypeptide comprises: a) an amino acid sequence having at least 95% amino acid sequence identity to the HLA-A*0101, HLA-A*0201, HLA-A*0201, HLA-A*1101, HLA-A*2301, HLA-A*2402, HLA-A*2407, HLA-A*3303, or HLA-A*3401 amino acid sequence depicted in FIG. 7A; or b) an amino acid sequence having at least 95% amino acid sequence identity to the HLA-B*0702, HLA-B*0801, HLA-B*1502, HLA-B*3802, HLA-B*4001, HLA-B*4601, or HLA-B*5301 amino acid sequence depicted in FIG. 8A; or c) an amino acid sequence having at least 95% amino acid sequence identity to the HLA-C*0102, HLA-C*0303, HLA-C*0304, HLA-C*0401, HLA-C*0602, HLA-C*0701, HLA-C*0702, HLA-C*0801, or HLA-C*1502 depicted in FIG. 9A.

[0700] Aspect 27. A T-cell modulatory multimeric polypeptide of any one of aspects 1-25, wherein the first MHC polypeptide is a β2M polypeptide, and wherein the second MHC polypeptide comprises an amino acid sequence having at least 95% amino acid sequence identity to an HLA-A*0201 polypeptide.

[0701] Aspect 28. A T-cell modulatory multimeric polypeptide of any one of aspects 1-25, wherein the first MHC polypeptide is a β2M polypeptide, and wherein the second MHC polypeptide is an HLA-A*1101 polypeptide.

[0702] Aspect 29. A T-cell modulatory multimeric polypeptide of any one of aspects 1-25, wherein the first MHC polypeptide is a β2M polypeptide, and wherein the second MHC polypeptide comprises an amino acid sequence having at least 95% amino acid sequence identity to an HLA-A*3303 polypeptide.

[0703] Aspect 30. A T-cell modulatory multimeric polypeptide of any one of aspects 1-25, wherein the first MHC polypeptide is a β2M polypeptide, and wherein the second MHC polypeptide comprises an amino acid sequence having at least 95% amino acid sequence identity to an HLA-A*2401 polypeptide.

[0704] Aspect 31. A T-cell modulatory multimeric polypeptide of any one of aspects 1-30, wherein the immunomodulatory polypeptide is a variant IL-2 polypeptide comprising: i) an H16A substitution and an F42A substitution; or ii) an H16T substitution and an F42A substitution.

[0705] Aspect 32. A T-cell modulatory multimeric polypeptide of any one of aspects 1-31, wherein the MUC1 peptide has the amino acid sequence STAPPVHNV (SEQ ID NO:587) and has a length of 9 amino acids.

[0706] Aspect 33. A T-cell modulatory multimeric polypeptide of any one of aspects 1-31, wherein the MUC1 peptide has the amino acid sequence SLAPPVHNV (SEQ ID NO:588) and has a length of 9 amino acids.

[0707] Aspect 34. A T-cell modulatory multimeric polypeptide of any one of aspects 1-31, wherein the MUC1 peptide has the amino acid sequence STAPPAHGV (SEQ ID NO:586) and has a length of 9 amino acids.

[0708] Aspect 35. A T-cell modulatory multimeric polypeptide of any one of aspects 1-31, wherein the MUC1 peptide has the amino acid sequence SLAPPAHGV (SEQ ID NO:589) and has a length of 9 amino acids.

[0709] Aspect 36. A T-cell modulatory multimeric polypeptide of any one of aspects 1-35, wherein the first polypeptide and/or the second polypeptide comprises a tumor-targeting polypeptide (TTP).

[0710] Aspect 37. A T-cell modulatory multimeric polypeptide of aspect 36, wherein the TTP is an antibody specific for a cancer-associated antigen on the surface of a cancer cell.

[0711] Aspect 38. A T-cell modulatory multimeric polypeptide of aspect 37, wherein the antibody is a scFv or a nanobody.

[0712] Aspect 39. A T-cell modulatory multimeric polypeptide of any one of aspects 1-35, wherein the multimeric polypeptide comprises a first and a second heterodimer, and wherein the first and second heterodimers are covalently bound by one or more disulfide bonds between the Ig Fc polypeptides of the first and second heterodimers.

[0713] Aspect 40. A nucleic acid comprising a nucleotide sequence encoding a first or second polypeptide according to any one of aspects 1-39, wherein the first or second polypeptide comprises at least one immunomodulatory domain.

[0714] Aspect 41. An expression vector comprising the nucleic acid of aspect 40.

[0715] Aspect 42. A method of selectively modulating the activity of T cell specific for a peptide epitope, the method comprising contacting the T cell with a T-cell modulatory multimeric polypeptide according to any one of aspects 1-39, wherein said contacting selectively modulates the activity of the epitope-specific T cell.

[0716] Aspect 43. A method of treating a patient having a cancer, the method comprising administering to the patient an effective amount of a pharmaceutical composition comprising T-cell modulatory multimeric polypeptide according to any one of aspects 1-39.

[0717] Aspect 44. The method of aspect 43, wherein the cancer an adenocarcinoma or a hematological cancer.

[0718] Aspect 45. The method of aspect 44, wherein the cancer is a multiple myeloma.

[0719] Aspect 46. The method of aspect 44, wherein the cancer is a B-cell lymphoma.

[0720] Aspect 47. The method of any one of aspects 43-46, wherein said administering is intramuscular.

[0721] Aspect 48. The method of any one of aspects 43-46, wherein said administering is intravenous.

[0722] Aspect 49. A method of modulating an immune response in an individual, the method comprising administering to the individual an effective amount of the T-cell modulatory multimeric polypeptide of any one of aspects 1-39, wherein said administering induces an epitope-specific T cell response and an epitope-non-specific T cell response, wherein the ratio of the epitope-specific T cell response to the epitope-non-specific T cell response is at least 2:1.

[0723] Aspect 50. A method of delivering an immunomodulatory polypeptide selectively to a target T cell, the method comprising contacting a mixed population of T cells with a T-cell modulatory multimeric polypeptide of any one of aspects 1-39, wherein the mixed population of T cells comprises the target T cell and non-target T cells, wherein the target T cell is specific for the MUC1 epitope present within the T-cell modulatory multimeric polypeptide, and wherein said contacting delivers the one or more immunomodulatory polypeptides present within the T-cell modulatory multimeric polypeptide to the target T cell.

[0724] Aspect 51. A method of detecting, in a mixed population of T cells obtained from an individual, the presence of a target T cell that binds a MUC1 peptide, the method comprising: a) contacting in vitro the mixed population of T cells with the T-cell modulatory multimeric polypeptide of any one of aspects 1-39, wherein the T-cell modulatory multimeric polypeptide comprises the peptide epitope; and b) detecting activation and/or proliferation of T cells in response to said contacting, wherein activated and/or proliferated T cells indicates the presence of the target T cell.

### Aspects Set B

[0725] Aspects, including embodiments, of the present subject matter described above may be beneficial alone or in combination, with one or more other aspects or embodiments. Without limiting the foregoing description, certain non-limiting aspects of the disclosure numbered 1-49 are provided below. As will be apparent to those of skill in the art upon reading this disclosure, each of the individually numbered aspects may be used or combined with any of the preceding or following individually numbered aspects. This is intended to provide support for all such combinations of aspects and is not limited to combinations of aspects explicitly provided below:

[0726] Aspect 1. A T-cell modulatory multimeric polypeptide comprising at least one heterodimer comprising: a) a first polypeptide comprising: i) a peptide epitope comprising an amino acid sequence selected from the group consisting of: STAPPAHGV; STAPPVHNV; SLAPPVHNV; SLAPPAHGV; SAPDTRPAP; VTSAPDTRPAPGSTAPPAHG; PDTRPAPGSTAPPAHGVTSA; and LLLLTVLTV; and ii) first class I major histocompatibility complex (MHC) polypeptide; b) a second polypeptide comprising a second class I MHC polypeptide, and c) one or more immunomodulatory polypeptides, wherein the first and/or the second polypeptide comprises the one or more immunomodulatory polypeptides, and optionally wherein the first or the second polypeptide comprises an immunoglobulin (Ig) Fc polypeptide.

[0727] Aspect 2. A T-cell modulatory multimeric polypeptide of aspect 1, wherein at least one of the one or more immunomodulatory polypeptides is a variant immunomodulatory polypeptide that exhibits reduced affinity to a cognate co-immunomodulatory polypeptide compared to the affinity of a corresponding wild-type immunomodulatory polypeptide for the cognate co-immunomodulatory polypeptide.

[0728] Aspect 3. A T-cell modulatory multimeric polypeptide of aspect 2, wherein the ratio of the binding affinity of the wild-type immunomodulatory polypeptide to a cognate co-immunomodulatory polypeptide to the binding affinity of the variant immunomodulatory polypeptide to the cognate co-immunomodulatory polypeptide, when measured by bio-layer interferometry, is at least 1.5:1.

[0729] Aspect 4. A T-cell modulatory multimeric polypeptide of aspect 2, wherein: the variant immunomodulatory polypeptide binds the co-immunomodulatory polypeptide with an affinity selected from the group consisting of from about 10⁻⁴ M to about 10⁻⁷ M, from about 10⁻⁴ M to about 10⁻⁶ M, or from about 10⁻⁴ M to about 10⁻⁵ M.

[0730] Aspect 5. A T-cell modulatory multimeric polypeptide of any one of aspects 1-4, wherein the first or the second polypeptide comprises an Ig Fc polypeptide, and wherein the Ig Fc polypeptide is an IgG1 Fc polypeptide.

[0731] Aspect 6. A T-cell modulatory multimeric polypeptide of aspect 5, wherein IgG1 Fc polypeptide comprises one or more amino acid substitutions selected from N297A, L234A, L235A, L234F, L235E, and P331S.

[0732] Aspect 7. A T-cell modulatory multimeric polypeptide of any one of aspects 1-6, wherein:

[0733] a1) the first polypeptide comprises, in order from N-terminus to C-terminus: i) the peptide epitope; and ii) the first MHC polypeptide; and b1) the second polypeptide comprises, in order from N-terminus to C-terminus: i) the one or more immunomodulatory polypeptides; ii) the second MHC polypeptide; and iii) an Ig Fc polypeptide; or

[0734] a2) the first polypeptide comprises, in order from N-terminus to C-terminus: i) the peptide epitope; and ii) the first MHC polypeptide; and b2) the second polypeptide comprises, in order from N-terminus to C-terminus: i) the second MHC polypeptide; and ii) the one or more immunomodulatory polypeptides; and iii) an Ig Fc polypeptide; or

[0735] a3) the first polypeptide comprises, in order from N-terminus to C-terminus: i) the peptide epitope; and ii) the first MHC polypeptide; and b3) the second polypeptide comprises, in order from N-terminus to C-terminus:i) the second MHC polypeptide; and ii) an Ig Fc polypeptide; and iii) the one or more immunomodulatory polypeptides; or

[0736] a4) the first polypeptide comprises, in order from N-terminus to C-terminus: i) the one or more immunomodulatory polypeptides; ii) the peptide epitope; and iii) the first MHC polypeptide; and b4) the second polypeptide comprises, in order from N-terminus to C-terminus: i) the second MHC polypeptide; and ii) an Ig Fc polypeptide; or

[0737] a5) the first polypeptide comprises, in order from N-terminus to C-terminus: i) the peptide epitope; ii) the first MHC polypeptide; and iii) the one or more immunomodulatory polypeptides; and b5) the second polypeptide comprises, in order from N-terminus to C-terminus: i) the second MHC polypeptide; and ii) an immunoglobulin (Ig) Fc polypeptide.

[0738] Aspect 8. A T-cell modulatory multimeric polypeptide of any one of aspects 1-7, wherein the first MHC polypeptide is a β2-microglobulin polypeptide; and wherein the second MHC polypeptide is an MHC class I heavy chain polypeptide.

[0739] Aspect 9. A T-cell modulatory multimeric polypeptide of any one of aspects 1-8, wherein at least one of the one or more immunomodulatory polypeptides is a stimulatory polypeptide.

[0740] Aspect 10. A T-cell modulatory multimeric polypeptide of aspect 9, wherein the stimulatory polypeptide is selected from the group consisting of a 4-1BBL, ICOS-L, OX-40L, CD80, CD86, CD70, a cytokine, and variants and combinations thereof.

[0741] Aspect 11. A T-cell modulatory multimeric polypeptide of any one of aspects 9 and 10, wherein at least one of the one or more immunomodulatory polypeptides is an IL-2 polypeptide.

[0742] Aspect 12. A T-cell modulatory multimeric polypeptide of aspect 11, wherein the immunomodulatory polypeptide is a variant IL-2 polypeptide.

[0743] Aspect 13. A T-cell modulatory multimeric polypeptide of aspect 12, wherein the variant IL-2 polypeptide comprises: i) an H16A substitution and an F42A substitution; or ii) an H16T substitution and an F42A substitution.

[0744] Aspect 14. A T-cell modulatory multimeric polypeptide of any one of aspects 1-8, wherein at least one of the one or more immunomodulatory polypeptides is an inhibitory polypeptide, optionally wherein the inhibitory polypeptide is selected from the group consisting of PD-L1, FasL, a cytokine, and PD-L2, and variants and combinations thereof.

[0745] Aspect 15. A T-cell modulatory multimeric polypeptide of any one of aspects 1-14, wherein the multimeric polypeptide comprises two or more immunomodulatory polypeptides, and wherein at least two of the immunomodulatory polypeptides are the same.

[0746] Aspect 16. A T-cell modulatory multimeric polypeptide of aspect 15, wherein the two or more immunomodulatory polypeptides are in tandem.

[0747] Aspect 17. A T-cell modulatory multimeric polypeptide of any of aspects 1-6, wherein: a1) the first polypeptide comprises, in order from N-terminus to C-terminus: i) the peptide epitope; and ii) the first MHC polypeptide; and b1) the second polypeptide comprises, in order from N-terminus to C-terminus: i) the one or more immunomodulatory polypeptides; ii) the second MHC polypeptide; and iii) an immunoglobulin (Ig) Fc polypeptide.

[0748] Aspect 18. A T-cell modulatory multimeric polypeptide of any of aspects 1-6, wherein: a3) the first polypeptide comprises, in order from N-terminus to C-terminus: i) the peptide epitope; and ii) the first MHC polypeptide; and b3) the second polypeptide comprises, in order from N-terminus to C-terminus: i) the second MHC polypeptide; and ii) an Ig Fc polypeptide; and iii) the one or more immunomodulatory polypeptides.

[0749] Aspect 19. A T-cell modulatory multimeric polypeptide of any one of aspects 1-18, wherein the first polypeptide and the second polypeptide are covalently linked to one another, optionally wherein the covalent linkage is via a disulfide bond.

[0750] Aspect 20. A T-cell modulatory multimeric polypeptide of aspect 19, wherein the β2M polypeptide and the MHC heavy chain polypeptide are joined by a disulfide bond that joins a Cys residue in the β2M polypeptide and a Cys residue in the MHC heavy chain polypeptide, optionally wherein a Cys at amino acid residue 12 of the β2M polypeptide is disulfide bonded to a Cys at amino acid residue 236 of the MHC heavy chain polypeptide.

[0751] Aspect 21. A T-cell modulatory multimeric polypeptide of aspect 19, wherein the first polypeptide chain comprises a linker between the peptide epitope and the β2M polypeptide, and wherein the disulfide bond links a Cys present in the linker with a Cys of the MHC heavy chain polypeptide.

[0752] Aspect 22. A T-cell modulatory multimeric polypeptide of aspect 19, wherein the first polypeptide chain comprises a linker between the peptide epitope and the β2M polypeptide, and wherein the disulfide bond links a Cys substituted for Gly2 in the linker with a Cys substituted for Tyr84 of the MHC heavy chain polypeptide.

[0753] Aspect 23. A T-cell modulatory multimeric polypeptide of any one of aspects 1-18, wherein the first and the second polypeptides are covalently linked to one another via at least 2 disulfide bonds.

[0754] Aspect 24. A T-cell modulatory multimeric polypeptide of aspect 23, wherein: a) a first disulfide bond is between: i) a Cys present in a linker between the peptide epitope and the first MHC class I polypeptide, wherein the first MHC class I polypeptide is a β2M polypeptide; and ii) a Cys residue introduced via a Y84C substitution in the second MHC class I polypeptide, wherein the second MHC class I polypeptide is an MHC Class I heavy chain polypeptide; and b) a second disulfide bond is between: i) a Cys residue introduced into the β2M polypeptide via an R12C substitution; and ii) a Cys residue introduced into the MHC Class I heavy chain polypeptide via an A236C substitution.

[0755] Aspect 25. A T-cell modulatory multimeric polypeptide of aspect 24, wherein the linker comprises the amino acid sequence GCGGS.

[0756] Aspect 26. A T-cell modulatory multimeric polypeptide of aspect 24, wherein the linker comprises the amino acid sequence GCGGS(GGGGS)n, where n is an integer from 1 to 10.

[0757] Aspect 27. A T-cell modulatory multimeric polypeptide of any one of aspects 1-26, wherein the peptide epitope is a peptide of at least 9 amino acids in length, e.g., from 9 amino acids to about 25 amino acids (e.g., 10 amino acids (aa), 11 aa, 12 aa, 13 aa, 14 aa, 15 aa, 16 aa, 17 aa, 18 aa, 19 aa, 20 aa, 21 aa, 22 aa, 23 aa, 24 aa, or 25 aa, including within a range of from 9 to 20 amino acids, from 9 to 18 amino acids, from 9 to 15 amino acids, from 9 to 12 amino acids, from 9 to 10 amino acids, from 10 to 20 amino acids, and from 15 to 25 amino acids in length).

[0758] Aspect 28. A T-cell modulatory multimeric polypeptide of any one of aspects 1-27, wherein the first or the second MHC polypeptide comprises: a) an amino acid sequence having at least 95% amino acid sequence identity to the HLA-A*0101, HLA-A*0201, HLA-A*0201, HLA-A*1101, HLA-A*2301, HLA-A*2402, HLA-A*2407, HLA-A*3303, or HLA-A*3401 amino acid sequence depicted in FIG. 7A; or b) an amino acid sequence having at least 95% amino acid sequence identity to the HLA-B*0702, HLA-B*0801, HLA-B*1502, HLA-B*3802, HLA-B*4001, HLA-B*4601, or HLA-B*5301 amino acid sequence depicted in FIG. 8A; or c) an amino acid sequence having at least 95% amino acid sequence identity to the HLA-C*0102, HLA-C*0303, HLA-C*0304, HLA-C*0401, HLA-C*0602, HLA-C*0701, HLA-C*0702, HLA-C*0801, or HLA-C*1502 depicted in FIG. 9A.

[0759] Aspect 29. A T-cell modulatory multimeric polypeptide of any one of aspects 1-27, wherein the first MHC polypeptide is a β2M polypeptide, and wherein the second MHC polypeptide comprises an amino acid sequence having at least 95% amino acid sequence identity to an HLA-A*0201 polypeptide.

[0760] Aspect 30. A T-cell modulatory multimeric polypeptide of any one of aspects 1-27, wherein the first MHC polypeptide is a β2M polypeptide, and wherein the second MHC polypeptide is an HLA-A*1101 polypeptide.

[0761] Aspect 31. A T-cell modulatory multimeric polypeptide of any one of aspects 1-27, wherein the first MHC polypeptide is a β2M polypeptide, and wherein the second MHC polypeptide comprises an amino acid sequence having at least 95% amino acid sequence identity to an HLA-A*3303 polypeptide.

[0762] Aspect 32. A T-cell modulatory multimeric polypeptide of any one of aspects 1-27, wherein the first MHC polypeptide is a β2M polypeptide, and wherein the second MHC polypeptide comprises an amino acid sequence having at least 95% amino acid sequence identity to an HLA-A*2401 polypeptide.

[0763] Aspect 33. A T-cell modulatory multimeric polypeptide of any one of aspects 1-32, wherein the peptide epitope comprises the amino acid sequence STAPPVHNV and has a length of 9 amino acids.

[0764] Aspect 34. A T-cell modulatory multimeric polypeptide of any one of aspects 1-32, wherein the peptide epitope comprises the amino acid sequence SLAPPVHNV and has a length of 9 amino acids.

[0765] Aspect 35. A T-cell modulatory multimeric polypeptide of any one of aspects 1-32, wherein the peptide epitope comprising the amino acid sequence STAPPAHGV and has a length of 9 amino acids.

[0766] Aspect 36. A T-cell modulatory multimeric polypeptide of any one of aspects 1-32, wherein the peptide epitope comprising the amino acid sequence SLAPPAHGV and has a length of 9 amino acids.

[0767] Aspect 37. A T-cell modulatory multimeric polypeptide of any one of aspects 1-36, wherein the first polypeptide and/or the second polypeptide comprises a tumor-targeting polypeptide (TTP).

[0768] Aspect 38. A T-cell modulatory multimeric polypeptide of aspect 37, wherein the TTP is an antibody specific for a cancer-associated antigen on the surface of a cancer cell.

[0769] Aspect 39. A T-cell modulatory multimeric polypeptide of aspect 38, wherein the antibody is a scFv or a nanobody.

[0770] Aspect 40. A T-cell modulatory multimeric polypeptide of any one of aspects 1-37, wherein the multimeric polypeptide comprises a first and a second heterodimer, and wherein the first and second heterodimers are covalently bound by one or more disulfide bonds between the Ig Fc polypeptides of the first and second heterodimers.

[0771] Aspect 41. A nucleic acid comprising a nucleotide sequence encoding a first or second polypeptide according to any one of aspects 1-40.

[0772] Aspect 42. An expression vector comprising the nucleic acid of aspect 41.

[0773] Aspect 43. A method of selectively modulating the activity of T cell specific for a peptide epitope, the method comprising contacting the T cell with a T-cell modulatory multimeric polypeptide according to any one of aspects 1-40, wherein said contacting selectively modulates the activity of the epitope-specific T cell.

[0774] Aspect 44. A method of treating a patient having a cancer, the method comprising administering to the patient an effective amount of a pharmaceutical composition comprising a T-cell modulatory multimeric polypeptide of any one of aspects 1-40.

[0775] Aspect 45. The method of aspect 44, wherein the cancer is selected from the group consisting of an adenocarcinoma, a hematological cancer, a multiple myeloma, a B-cell lymphoma,

[0776] Aspect 46. The method of aspect 44 or aspect 45, wherein said administering is subcutaneously, intraperitoneally, intramuscularly, intradermal, intratumoral, peritumoral, and/or intravenously.

[0777] Aspect 47. A method of modulating an immune response in an individual, the method comprising administering to the individual an effective amount of a T-cell modulatory multimeric polypeptide of any one of aspects 1-40, wherein said administering induces an epitope-specific T cell response and an epitope-non-specific T cell response, wherein the ratio of the epitope-specific T cell response to the epitope-non-specific T cell response is at least 2:1.

[0778] Aspect 48. A method of delivering an immunomodulatory polypeptide selectively to a target T cell, the method comprising contacting a mixed population of T cells with a T-cell modulatory multimeric polypeptide of any one of aspects 1-40, wherein the mixed population of T cells comprises the target T cell and non-target T cells, wherein the target T cell is specific for the MUC1 epitope present within the T-cell modulatory multimeric polypeptide, and wherein said contacting delivers the one or more immunomodulatory polypeptides present within the T-cell modulatory multimeric polypeptide to the target T cell.

[0779] Aspect 49. A method of detecting, in a mixed population of T cells obtained from an individual, the presence of a target T cell that binds a peptide epitope, the method comprising: a) contacting in vitro the mixed population of T cells with a T-cell modulatory multimeric polypeptide of any one of aspects 1-40, wherein the T-cell modulatory multimeric polypeptide comprises the peptide epitope; and b) detecting activation and/or proliferation of T cells in response to said contacting, wherein activated and/or proliferated T cells indicates the presence of the target T cell.

[0780] While the present invention has been described with reference to the specific embodiments thereof, it should be understood by those skilled in the art that various changes may be made and equivalents may be substituted without departing from the true spirit and scope of the invention. In addition, many modifications may be made to adapt a particular situation, material, composition of matter, process, process step or steps, to the objective, spirit and scope of the present invention. All such modifications are intended to be within the scope of the claims appended hereto.

The application's sequence listing, which the Patent Office published only in electronic form, follows.

SEQUENCE LISTING (607 sequences)

SEQ ID NO: 1 - protein, 245 aa, Homo sapiens
MRIFAVFIFMTYWHLLNAFTVTVPKDLYVVEYGSNMTIECKFPVEKQLDLAALIVYWEMEDKNIIQFVHGEEDLKVQHSSYRQRARLLKDQLSLGNAALQITDVKLQDAGVYRCMISYGGADYKRITVKVNAPYNKINQRILVVDPVTSEHELTCQAEGYPKAEVIWTSSDHQVLSGKTTTTNSKREEKLFNVTSTLRINTTTNEIFYCTFRRLDPEENHTAELVIPGNILNVSIKICLTLSPST

SEQ ID NO: 2 - protein, 219 aa, Homo sapiens
FTVTVPKDLYVVEYGSNMTIECKFPVEKQLDLAALIVYWEMEDKNIIQFVHGEEDLKVQHSSYRQRARLLKDQLSLGNAALQITDVKLQDAGVYRCMISYGGADYKRITVKVNAPYNKINQRILVVDPVTSEHELTCQAEGYPKAEVIWTSSDHQVLSGKTTTTNSKREEKLFNVTSTLRINTTTNEIFYCTFRRLDPEENHTAELVIPGNILNVSIKI

SEQ ID NO: 3 - protein, 268 aa, Homo sapiens
PGWFLDSPDRPWNPPTFSPALLVVTEGDNATFTCSFSNTSESFVLNWYRMSPSNQTDKLAAFPEDRSQPGQDCRFRVTQLPNGRDFHMSVVRARRNDSGTYLCGAISLAPKAQIKESLRAELRVTERRAEVPTAHPSPSPRPAGQFQTLVVGVVGGLLGSLVLLVWVLAVICSRAARGTIGARRTGQPLKEDPSAVPVFSVDYGELDFQWREKTPEPPVPCVPEQTEYATIVFPSGMGTSSPARRGSADGPRSAQPLRPEDGHCSWPL

SEQ ID NO: 4 - protein, 208 aa, Homo sapiens [sequence omitted]

SEQ ID NO: 5 - protein, 220 aa, Homo sapiens
MLRLLLALNLFPSIQVTGNKILVKQSPMLVAYDNAVNLSCKYSYNLFSREFRASLHKGLDSAVEVCVVYGNYSQQLQVYSKTGFNCDGKLGNESVTFYLQNLYVNQTDIYFCKIEVMYPPPYLDNEKSNGTIIHVKGKHLCPSPLFPGPSKPFWVLVVVGGVLACYSLLVTVAFIIFWVRSKRSRLLHSDYMNMTPRRPGPTRKHYQPYAPPRDFAAYRS

SEQ ID NO: 6 - protein, 113 aa, Homo sapiens
FPSIQVTGNKILVKQSPMLVAYDNAVNLSWKHLCPSPLFPGPSKPFWVLVVVGGVLACYSLLVTVAFIIFWVRSKRSRLLHSDYMNMTPRRPGPTRKHYQPYAPPRDFAAYRS

SEQ ID NO: 7 - protein, 101 aa, Homo sapiens
MLRLLLALNLFPSIQVTGKHLCPSPLFPGPSKPFWVLVVVGGVLACYSLLVTVAFIIFWVRSKRSRLLHSDYMNMTPRRPGPTRKHYQPYAPPRDFAAYRS

SEQ ID NO: 8 - protein, 224 aa, Homo sapiens
APLKIQAYFNETADLPCQFANSQNQSLSELVVFWQDQENLVLNEVYLGKEKFDSVHSKYMNRTSFDSDSWTLRLHNLQIKDKGLYQCIIHHKKPTGMIRIHQMNSELSVLANFSQPEIVPISNITENVYINLTCSSIHGYPEPKKMSVLLRTKNSTIEYDGIMQKSQDNVTELYDVSISLSVSFPDVTSNMTIFCILETDKTRLLSSPFSIELEDPQPPPDHIP

SEQ ID NO: 9 - protein, 110 aa, Homo sapiens
APLKIQAYFNETADLPCQFANSQNQSLSELVVFWQDQENLVLNEVYLGKEKFDSVHSKYMNRTSFDSDSWTLRLHNLQIKDKGLYQCIIHHKKPTGMIRIHQMNSELSVL

SEQ ID NO: 10 - protein, 254 aa, Homo sapiens
MEYASDASLDPEAPWPPAPRARACRVLPWALVAGLLLLLLLAAACAVFLACPWAVSGARASPGSAASPRLREGPELSPDDPAGLLDLRQGMFAQLVAQNVLLIDGPLSWYSDPGLAGVSLTGGLSYKEDTKELVVAKAGVYYVFFQLELRRVVAGEGSGSVSLALHLQPLRSAAGAAALALTVDLPPASSEARNSAFGFQGRLLHLSAGQRLGVHLHTEARARHAWQLTQGATVLGLFRVTPEIPAGLPSPRSE

SEQ ID NO: 11 - protein, 174 aa, Homo sapiens
PAGLLDLRQGMFAQLVAQNVLLIDGPLSWYSDPGLAGVSLTGGLSYKEDTKELVVAKAGVYYVFFQLELRRVVAGEGSGSVSLALHLQPLRSAAGAAALALTVDLPPASSEARNSAFGFQGRLLHLSAGQRLGVHLHTEARARHAWQLTQGATVLGLFRVTPEIPAGLPSPRSE

SEQ ID NO: 12 - protein, 175 aa, Homo sapiens
DPAGLLDLRQGMFAQLVAQNVLLIDGPLSWYSDPGLAGVSLTGGLSYKEDTKELVVAKAGVYYVFFQLELRRVVAGEGSGSVSLALHLQPLRSAAGAAALALTVDLPPASSEARNSAFGFQGRLLHLSAGQRLGVHLHTEARARHAWQLTQGATVLGLFRVTPEIPAGLPSPRSE

SEQ ID NO: 13 - protein, 167 aa, Homo sapiens
DPAGLLDLRQGMFAQLVAQNVLLIDGPLSWYSDPGLAGVSLTGGLSYKEDTKELVVAKAGVYYVFFQLELRRVVAGEGSGSVSLALHLQPLRSAAGAAALALTVDLPPASSEARNSAFGFQGRLLHLSAGQRLGVHLHTEARARHAWQLTQGATVLGLFRVTPEIPA

SEQ ID NO: 14 - protein, 255 aa, Homo sapiens
MGNSCYNIVATLLLVLNFERTRSLQDPCSNCPAGTFCDNNRNQICSPCPPNSFSSAGGQRTCDICRQCKGVFRTRKECSSTSNAECDCTPGFHCLGAGCSMCEQDCKQGQELTKKGCKDCCFGTFNDQKRGICRPWTNCSLDGKSVLVNGTKERDVVCGPSPADLSPGASSVTPPAPAREPGHSPQIISFFLALTSTALLFLLFFLTLRFSVVKRGRKKLLYIFKQPFMRPVQTTQEEDGCSCRFPEEEEGGCEL

SEQ ID NO: 15 - protein, 133 aa, Homo sapiens [sequence omitted]

SEQ ID NO: 16 - protein, 251 aa, Homo sapiens
ELCDDDPPEIPHATFKAMAYKEGTMLNCECKRGFRRIKSGSLYMLCTGNSSHSSWDNQCQCTSSATRNTTKQVTPQPEEQKERKTTEMQSPMQPVDQASLPGHCREPPPWENEATERIYHFVVGQMVYYQCVQGYRALHRGPAESVCKMTHGKTRWTQPQLICTGEMETSQFPGEEKPQASPEGRPESETSCLVTTTDFQIQTEMAATMETSIFTTEYQVAVAGCVFLLISVLLLSGLTWQRRQRKSRRTI

SEQ ID NO: 17 - protein, 524 aa, Homo sapiens
VNGTSQFTCFYNSRANISCVWSQDGALQDTSCQVHAWPDRRRWNQTCELLPVSQASWACNLILGAPDSQKLTTVDIVTLRVLCREGVRWRVMAIQDFKPFENLRLMAPISLQVVHVETHRCNISWEISQASHYFERHLEFEARTLSPGHTWEEAPLLTLKQKQEWICLETLTPDTQYEFQVRVKPLQGEFTTWSPWSQPLAFRTKPAALGKDTIPWLGHLLVGLSGAFGFIILVYLLINCRNTGPWLKKVLKCNTPDPSKFFSQLSSEHGGDVQKWLSSPFPSSSFSPGGLAPEISPLEVLERDKVTQLLLQQDKVPEPASLSSNHSLTSCFTNQGYFFFHLPDALEIEACQVYFTYDPYSEEDPDEGVAGAPTGSSPQPLQPLSGEDDAYCTFPSRDDLLLFSPSLLGGPSPPSTAPGGSGAGEERMPPSLQERVPRDWDPQPLGPPTPGVPDLVDFQPPPELVLREAGEEVPDAGPREGVSFPWSRPPGQGEFRALNARLPLNTDAYLSLQELQGQDPTHLV

SEQ ID NO: 18 - protein, 347 aa, Homo sapiens
LNTTILTPNGNEDTTADFFLTTMPTDSLSVSTLPLPEVQCFVFNVEYMNCTWNSSSEPQPTNLTLHYWYKNSDNDKVQKCSHYLFSEEITSGCQLQKKEIHLYQTFVVQLQDPREPRRQATQMLKLQNLVIPWAPENLTLHKLSESQLELNWNNRFLNHCLEHLVQYRTDWDHSWTEQSVDYRHKFSLPSVDGQKRYTFRVRSRFNPLCGSAQHWSEWSHPIHWGSNTSKENPFLFALEAVVISVGSMGLIISLLCVYFWLERTMPRIPTLKNLEDLVTEYHGNFSAWSGVSKGLAESLQPDYSERLCLVSEIPPKGGALGEGPGASPCNQHSPYWAPPCYTLKPET

SEQ ID NO: 19 - protein, 227 aa, Artificial sequence
  synthetic sequence
DKTHTCPPCPAPELLGGPSVFLFPPKPKDTLMISRTPEVTCVVVDVSHEDPEVKFNWYVDGVEVHNAKTKPREEQYNSTYRVVSVLTVLHQDWLNGKEYKCKVSNKALPAPIEKTISKAKGQPREPQVYTLPPSRDELTKNQVSLTCLVKGFYPSDIAVEWESNGQPENNYKTTPPVLDSDGSFFLYSKLTVDKSRWQQGNVFSCSVMHEALHNHYTQKSLSLSPGK

SEQ ID NO: 20 - protein, 325 aa, Artificial sequence
  synthetic sequence
STKGPSVFPLAPCSRSTSESTAALGCLVKDYFPEPVTVSWNSGALTSGVHTFPAVLQSSGLYSLSSVVTVPSSNFGTQTYTCNVDHKPSNTKVDKTVERKCCVECPPCPAPPVAGPSVFLFPPKPKDTLMISRTPEVTCVVVDVSHEDPEVQFNWYVDGVEVHNAKTKPREEQFNSTFRVVSVLTVVHQDWLNGKEYKCKVSNKGLPAPIEKTISKTKGQPREPQVYTLPPSREEMTKNQVSLTCLVKGFYPSDIAVEWESNGQPENNYKTTPPMLDSDGSFFLYSKLTVDKSRWQQGNVFSCSVMHEALHNHYTQKSLSLSPGK

SEQ ID NO: 21 - protein, 246 aa, Artificial sequence
  synthetic sequence
HKPSNTKVDKRVELKTPLGDTTHTCPPCPAPELLGGPSVFLFPPKPKDTLMISRTPEVTCVVVDVSHEDPEVKFNWYVDGVEVHNAKTKPREEQYNSTYRVVSVLTVLHQDWLNGKEYKCKVSNKALPAPIEKTISKAKGQPREPQVYTLPPSRDELTKNQVSLTCLVKGFYPSDIAVEWESNGQPENNYKTTPPVLDSDGSFFLYSKLTVDKSRWQQGNVFSCSVMHEALHNHYTQKSLSLSPGK

SEQ ID NO: 22 - protein, 383 aa, Artificial sequence
  synthetic sequence
PTKAPDVFPIISGCRHPKDNSPVVLACLITGYHPTSVTVTWYMGTQSQPQRTFPEIQRRDSYYMTSSQLSTPLQQWRQGEYKCVVQHTASKSKKEIFRWPESPKAQASSVPTAQPQAEGSLAKATTAPATTRNTGRGGEEKKKEKEKEEQEERETKTPECPSHTQPLGVYLLTPAVQDLWLRDKATFTCFVVGSDLKDAHLTWEVAGKVPTGGVEEGLLERHSNGSQSQHSRLTLPRSLWNAGTSVTCTLNHPSLPPQRLMALREPAAQAPVKLSLNLLASSDPPEAASWLLCEVSGFSPPNILLMWLEDQREVNTSGFAPARPPPQPRSTTFWAWSVLRVPAPPSPQPATYTCVVSHEDSRTLLNASRSLEVSYVTDHGPMK

SEQ ID NO: 23 - protein, 276 aa, Artificial sequence
  synthetic sequence
VTSTLTIKZSDWLGESMFTCRVDHRGLTFQQNASSMCVPDQDTAIRVFAIPPSFASIFLTKSTKLTCLVTDLTTYBSVTISWTREENGAVKTHTNISESHPNATFSAVGEASICEDBDWSGERFTCTVTHTDLPSPLKQTISRPKGVALHRPBVYLLPPARZZLNLRESATITCLVTGFSPADVFVEWMQRGEPLSPQKYVTSAPMPEPQAPGRYFAHSILTVSEEEWNTGGTYTCVVAHEALPNRVTERTVDKSTGKPTLYNVSLVMSDTAGTCY

SEQ ID NO: 24 - protein, 353 aa, Artificial sequence
  synthetic sequence
ASPTSPKVFPLSLCSTQPDGNVVIACLVQGFFPQEPLSVTWSESGQGVTARNFPPSQDASGDLYTTSSQLTLPATQCLAGKSVTCHVKHYTNPSQDVTVPCPVPSTPPTPSPSTPPTPSPSCCHPRLSLHRPALEDLLLGSEANLTCTLTGLRDASGVTFTWTPSSGKSAVQGPPERDLCGCYSVSSVLPGCAEPWNHGKTFTCTAAYPESKTPLTATLSKSGNTFRPEVHLLPPPSEELALNELVTLTCLARGFSPKDVLVRWLQGSQELPREKYLTWASRQEPSQGTTTFAVTSILRVAAEDWKKGDTFSCMVGHEALPLAFTQKTIDRLAGKPTHVNVSVVMAEVDGTCY

SEQ ID NO: 25 - protein, 222 aa, Artificial sequence
  synthetic sequence
ADPCDSNPRGVSAYLSRPSPFDLFIRKSPTITCLVVDLAPSKGTVNLTWSRASGKPVNHSTRKEEKQRNGTLTVTSTLPVGTRDWIEGETYQCRVTHPHLPRALMRSTTKTSGPRAAPEVYAFATPEWPGSRDKRTLACLIQNFMPEDISVQWLHNEVQLPDARHSTTQPRKTKGSGFFVFSRLEVTRAEWEQKDEFICRAVHEAASPSQTVQRAVSVNPGK

SEQ ID NO: 26 - protein, 327 aa, Artificial sequence
  synthetic sequence
ASTKGPSVFPLAPCSRSTSESTAALGCLVKDYFPEPVTVSWNSGALTSGVHTFPAVLQSSGLYSLSSVVTVPSSSLGTKTYTCNVDHKPSNTKVDKRVESKYGPPCPSCPAPEFLGGPSVFLFPPKPKDTLMISRTPEVTCVVVDVSQEDPEVQFNWYVDGVEVHNAKTKPREEQFNSTYRVVSVLTVLHQDWLNGKEYKCKVSNKGLPSSIEKTISKAKGQPREPQVYTLPPSQEEMTKNQVSLTCLVKGFYPSDIAVEWESNGQPENNYKTTPPVLDSDGSFFLYSRLTVDKSRWQEGNVFSCSVMHEALHNHYTQKSLSLSLGK

SEQ ID NO: 27 - protein, 227 aa, Artificial sequence
  synthetic sequence
DKTHTCPPCPAPELLGGPSVFLFPPKPKDTLMISRTPEVTCVVVDVSHEDPEVKFNWYVDGVEVHNAKTKPREEQYNSTYRVVSVLTVLHQDWLNGKEYKCKVSNKALPAPIEKTISKAKGQPREPQVYTLPPSREEMTKNQVSLTCLVKGFYPSDIAVEWESNGQPENNYKTTPPVLDSDGSFFLYSKLTVDKSRWQQGNVFSCSVMHEALHNHYTQKSLSLSPGK

SEQ ID NO: 28 - protein, 227 aa, Artificial sequence
  synthetic sequence
DKTHTCPPCPAPEFEGGPSVFLFPPKPKDTLMISRTPEVTCVVVDVSHEDPEVKFNWYVDGVEVHNAKTKPREEQYNSTYRVVSVLTVLHQDWLNGKEYKCKVSNKALPASIEKTISKAKGQPREPQVYTLPPSREEMTKNQVSLTCLVKGFYPSDIAVEWESNGQPENNYKTTPPVLDSDGSFFLYSKLTVDKSRWQQGNVFSCSVMHEALHNHYTQKSLSLSPGK

SEQ ID NO: 29 - protein, 227 aa, Artificial sequence
  synthetic sequence
DKTHTCPPCPAPELLGGPSVFLFPPKPKDTLMISRTPEVTCVVVDVSHEDPEVKFNWYVDGVEVHNAKTKPREEQYASTYRVVSVLTVLHQDWLNGKEYKCKVSNKALPAPIEKTISKAKGQPREPQVYTLPPSREEMTKNQVSLTCLVKGFYPSDIAVEWESNGQPENNYKTTPPVLDSDGSFFLYSKLTVDKSRWQQGNVFSCSVMHEALHNHYTQKSLSLSPGK

SEQ ID NO: 30 - protein, 227 aa, Artificial sequence
  synthetic sequence
DKTHTCPPCPAPEAAGGPSVFLFPPKPKDTLMISRTPEVTCVVVDVSHEDPEVKFNWYVDGVEVHNAKTKPREEQYNSTYRVVSVLTVLHQDWLNGKEYKCKVSNKALPAPIEKTISKAKGQPREPQVYTLPPSREEMTKNQVSLTCLVKGFYPSDIAVEWESNGQPENNYKTTPPVLDSDGSFFLYSKLTVDKSRWQQGNVFSCSVMHEALHNHYTQKSLSLSPGK

SEQ ID NO: 31 - protein, 119 aa, Homo sapiens
MSRSVALAVLALLSLSGLEAIQRTPKIQVYSRHPAENGKSNFLNCYVSGFHPSDIEVDLLKNGERIEKVEHSDLSFSKDWSFYLLYYTEFTPTEKDEYACRVNHVTLSQPKIVKWDRDM

SEQ ID NO: 32 - protein, 119 aa, Macaca mulatta
MSRSVALAVLALLSLSGLEAIQRTPKIQVYSRHPPENGKPNFLNCYVSGFHPSDIEVDLLKNGEKMGKVEHSDLSFSKDWSFYLLYYTEFTPNEKDEYACRVNHVTLSGPRTVKWDRDM

SEQ ID NO: 33 - protein, 118 aa, Bos Taurus
MARFVALVLLGLLSLSGLDAIQRPPKIQVYSRHPPEDGKPNYLNCYVYGFHPPQIEIDLLKNGEKIKSEQSDLSFSKDWSFYLLSHAEFTPNSKDQYSCRVKHVTLEQPRIVKWDRDL

SEQ ID NO: 34 - protein, 119 aa, Mus musculus
MARSVTLVFLVLVSLTGLYAIQKTPQIQVYSRHPPENGKPNILNCYVTQFHPPHIEIQMLKNGKKIPKVEMSDMSFSKDWSFYILAHTEFTPTETDTYACRVKHASMAEPKTVYWDRDM

SEQ ID NO: 35 - protein, 365 aa, Homo sapiens
MAVMAPRTLLLLLSGALALTQTWAGSHSMRYFFTSVSRPGRGEPRFIAVGYVDDTQFVRFDSDAASQKMEPRAPWIEQEGPEYWDQETRNMKAHSQTDRANLGTLRGYYNQSEDGSHTIQIMYGCDVGPDGRFLRGYRQDAYDGKDYIALNEDLRSWTAADMAAQITKRKWEAVHAAEQRRVYLEGRCVDGLRRYLENGKETLQRTDPPKTHMTHHPISDHEATLRCWALGFYPAEITLTWQRDGEDQTQDTELVETRPAGDGTFQKWAAVVVPSGEEQRYTCHVQHEGLPKPLTLRWELSSQPTIPIVGIIAGLVLLGAVITGAVVAAVMWRRKSSDRKGGSYTQAASSDSAQGSDVSLTACKV

SEQ ID NO: 36 - protein, 365 aa, Homo sapiens
MAVMAPRTLLLLLSGALALTQTWAGSHSMRYFYTSVSRPGRGEPRFIAVGYVDDTQFVRFDSDAASQRMEPRAPWIEQEGPEYWDQETRNVKAQSQTDRVDLGTLRGYYNQSEDGSHTIQIMYGCDVGPDGRFLRGYRQDAYDGKDYIALNEDLRSWTAADMAAQITKRKWEAAHAAEQQRAYLEGRCVEWLRRYLENGKETLQRTDPPKTHMTHHPISDHEATLRCWALGFYPAEITLTWQRDGEDQTQDTELVETRPAGDGTFQKWAAVVVPSGEEQRYTCHVQHEGLPKPLTLRWELSSQPTIPIVGIIAGLVLLGAVITGAVVAAVMWRRKSSDRKGGSYTQAASSDSAQGSDVSLTACKV

SEQ ID NO: 37 - protein, 365 aa, Homo sapiens [sequence omitted]

SEQ ID NO: 38 - protein, 365 aa, Homo sapiens [sequence omitted]

SEQ ID NO: 39 - protein, 362 aa, Homo sapiens
MLVMAPRTVLLLLSAALALTETWAGSHSMRYFYTSVSRPGRGEPRFISVGYVDDTQFVRFDSDAASPREEPRAPWIEQEGPEYWDRNTQIYKAQAQTDRESLRNLRGYYNQSEAGSHTLQSMYGCDVGPDGRLLRGHDQYAYDGKDYIALNEDLRSWTAADTAAQITQRKWEAAREAEQRRAYLEGECVEWLRRYLENGKDKLERADPPKTHVTHHPISDHEATLRCWALGFYPAEITLTWQRDGEDQTQDTELVETRPAGDRTFQKWAAVVVPSGEEQRYTCHVQHEGLPKPLTLRWEPSSQSTVPIVGIVAGLAVLAVVVIGAVVAAVMCRRKSSGGKGGSYSQAACSDSAQGSDVSLTA

SEQ ID NO: 40 - protein, 366 aa, Homo sapiens
MRVMAPRALLLLLSGGLALTETWACSHSMRYFDTAVSRPGRGEPRFISVGYVDDTQFVRFDSDAASPRGEPRAPWVEQEGPEYWDRETQNYKRQAQADRVSLRNLRGYYNQSEDGSHTLQRMYGCDLGPDGRLLRGYDQSAYDGKDYIALNEDLRSWTAADTAAQITQRKLEAARAAEQLRAYLEGTCVEWLRRYLENGKETLQRAEPPKTHVTHHPLSDHEATLRCWALGFYPAEITLTWQRDGEDQTQDTELVETRPAGDGTFQKWAAVVVPSGQEQRYTCHMQHEGLQEPLTLSWEPSSQPTIPIMGIVAGLAVLVVLAVLGAVVTAMMCRRKSSGGKGGSCSQAACSNSAQGSDESLITCKA

SEQ ID NO: 41 - protein, 275 aa, Homo sapiens
GSHSMRYFFTSVSRPGRGEPRFIAVGYVDDTQFVRFDSDAASQKMEPRAPWIEQEGPEYWDQETRNMKAHSQTDRANLGTLRGYYNQSEDGSHTIQIMYGCDVGPDGRFLRGYRQDAYDGKDYIALNEDLRSWTAADMAAQITKRKWEAVHAAEQRRVYLEGRCVDGLRRYLENGKETLQRTDPPKTHMTHHPISDHEATLRCWALGFYPAEITLTWQRDGEDQTQDTELVETRPAGDGTFQKWAAVVVPSGEEQRYTCHVQHEGLPKPLTLRWE

SEQ ID NO: 42 - protein, 275 aa, Homo sapiens
GSHSMRYFYTSVSRPGRGEPRFISVGYVDDTQFVRFDSDAASPREEPRAPWIEQEGPEYWDRNTQIYKAQAQTDRESLRNLRGYYNQSEAGSHTLQSMYGCDVGPDGRLLRGHDQYAYDGKDYIALNEDLRSWTAADTAAQITQRKWEAAREAEQRRAYLEGECVEWLRRYLENGKDKLERADPPKTHVTHHPISDHEATLRCWALGFYPAEITLTWQRDGEDQTQDTELVETRPAGDRTFQKWAAVVVPSGEEQRYTCHVQHEGLPKPLTLRWE

SEQ ID NO: 43 - protein, 275 aa, Homo sapiens
CSHSMRYFDTAVSRPGRGEPRFISVGYVDDTQFVRFDSDAASPRGEPRAPWVEQEGPEYWDRETQNYKRQAQADRVSLRNLRGYYNQSEDGSHTLQRMYGCDLGPDGRLLRGYDQSAYDGKDYIALNEDLRSWTAADTAAQITQRKLEAARAAEQLRAYLEGTCVEWLRRYLENGKETLQRAEPPKTHVTHHPLSDHEATLRCWALGFYPAEITLTWQRDGEDQTQDTELVETRPAGDGTFQKWAAVVVPSGQEQRYTCHMQHEGLQEPLTLSWE

SEQ ID NO: 44 - protein, 276 aa, Homo sapiens [sequence omitted]

SEQ ID NO: 45 - protein, 274 aa, Mus musculus
GPHSLRYFVTAVSRPGLGEPRFIAVGYVDDTQFVRFDSDADNPRFEPRAPWMEQEGPEYWEEQTQRAKSDEQWFRVSLRTAQRYYNQSKGGSHTFQRMFGCDVGSDWRLLRGYQQFAYDGRDYIALNEDLKTWTAADTAALITRRKWEQAGDAEYYRAYLEGECVEWLRRYLELGNETLLRTDSPKAHVTYHPRSQVDVTLRCWALGFYPADITLTWQLNGEDLTQDMELVETRPAGDGTFQKWAAVVVPLGKEQNYTCHVHHKGLPEPLTLRW

SEQ ID NO: 46 - protein, 275 aa, Artificial sequence
  synthetic sequence
GSHSMRYFFTSVSRPGRGEPRFIAVGYVDDTQFVRFDSDAASQRMEPRAPWIEQEGPEYWDGETRKVKAHSQTHRVDLGTLRGAYNQSEAGSHTVQRMYGCDVGSDWRFLRGYHQYAYDGKDYIALKEDLRSWTAADMAAQTTKHKWEAAHVAEQLRAYLEGTCVEWLRRYLENGKETLQRTDAPKTHMTHHAVSDHEATLRCWALSFYPAEITLTWQRDGEDQTQDTELVETRPCGDGTFQKWAAVVVPSGQEQRYTCHVQHEGLPKPLTLRWE

SEQ ID NO: 47 - protein, 275 aa, Artificial sequence
  synthetic sequence
GSHSMRYFFTSVSRPGRGEPRFIAVGYVDDTQFVRFDSDAASQRMEPRAPWIEQEGPEYWDGETRKVKAHSQTHRVDLGTLRGCYNQSEAGSHTVQRMYGCDVGSDWRFLRGYHQYAYDGKDYIALKEDLRSWTAADMCAQTTKHKWEAAHVAEQLRAYLEGTCVEWLRRYLENGKETLQRTDAPKTHMTHHAVSDHEATLRCWALSFYPAEITLTWQRDGEDQTQDTELVETRPCGDGTFQKWAAVVVPSGQEQRYTCHVQHEGLPKPLTLRWE

SEQ ID NO: 48 - protein, 276 aa, Artificial sequence
  synthetic sequence
GSHSMRYFFTSVSRPGRGEPRFIAVGYVDDTQFVRFDSDAASQRMEPRAPWIEQEGPEYWDGETRKVKAHSQTHRVDLGTLRGAYNQSEAGSHTVQRMYGCDVGSDWRFLRGYHQYAYDGKDYIALKEDLRSWTAADMAAQTTKHKWEAAHVAEQLRAYLEGTCVEWLRRYLENGKETLQRTDAPKTHMTHHAVSDHEATLRCWALSFYPAEITLTWQRDGEDQTQDTELVETRPCGDGTFQKWAAVVVPSGQEQRYTCHVQHEGLPKPLTLRWEP

SEQ ID NO: 49 - protein, 276 aa, Homo sapiens
GSHSMRYFYTSVSRPGRGEPRFIAVGYVDDTQFVRFDSDAASQRMEPRAPWIEQEGPEYWDQETRNVKAQSQTDRVDLGTLRGYYNQSEDGSHTIQIMYGCDVGPDGRFLRGYRQDAYDGKDYIALNEDLRSWTAADMAAQITKRKWEAAHAAEQQRAYLEGRCVEWLRRYLENGKETLQRTDPPKTHMTHHPISDHEATLRCWALGFYPAEITLTWQRDGEDQTQDTELVETRPAGDGTFQKWAAVVVPSGEEQRYTCHVQHEGLPKPLTLRWEL

SEQ ID NO: 50 - protein, 276 aa, Homo sapiens
GSHSMRYFSTSVSRPGRGEPRFIAVGYVDDTQFVRFDSDAASQRMEPRAPWIEQEGPEYWDEETGKVKAHSQTDRENLRIALRYYNQSEAGSHTLQMMFGCDVGSDGRFLRGYHQYAYDGKDYIALKEDLRSWTAADMAAQITKRKWEAAHVAEQQRAYLEGTCVDGLRRYLENGKETLQRTDPPKTHMTHHPISDHEATLRCWALGFYPAEITLTWQRDGEDQTQDTELVETRPAGDGTFQKWAAVVVPSGEEQRYTCHVQHEGLPKPLTLRWEP

SEQ ID NO: 51 - protein, 276 aa, Homo sapiens
GSHSMRYFTTSVSRPGRGEPRFIAVGYVDDTQFVRFDSDAASQRMEPRAPWIEQEGPEYWDRNTRNVKAHSQIDRVDLGTLRGYYNQSEAGSHTIQMMYGCDVGSDGRFLRGYQQDAYDGKDYIALNEDLRSWTAADMAAQITQRKWEAARVAEQLRAYLEGTCVEWLRRYLENGKETLQRTDPPKTHMTHHAVSDHEATLRCWALSFYPAEITLTWQRDGEDQTQDTELVETRPAGDGTFQKWASVVVPSGQEQRYTCHVQHEGLPKPLTLRWEP

SEQ ID NO: 52 - protein, 276 aa, Artificial sequence
  synthetic sequence
GSHSMRYFFTSVSRPGRGEPRFIAVGYVDDTQFVRFDSDAASQKMEPRAPWIEQEGPEYWDQETRNMKAHSQTDRANLGTLRGYYNQSEDGSHTIQIMYGCDVGPDGRFLRGYRQDAYDGKDYIALNEDLRSWTAADMAAQITKRKWEAVHAAEQRRVYLEGRCVDGLRRYLENGKETLQRTDPPKTHMTHHPISDHEATLRCWALGFYPAEITLTWQRDGEDQTQDTELVETRPAGDGTFQKWAAVVVPSGEEQRYTCHVQHEGLPKPLTLRWEL

SEQ ID NO: 53 - protein, 276 aa, Artificial sequence [sequence omitted]

SEQ ID NO: 54 - protein, 276 aa, Artificial sequence
  synthetic sequence
GSHSMRYFFTSVSRPGRGEPRFIAVGYVDDTQFVRFDSDAASQRMEPRAPWIEQEGPEYWDQETRNVKAQSQTDRVDLGTLRGYYNQSEAGSHTIQIMYGCDVGSDGRFLRGYRQDAYDGKDYIALNEDLRSWTAADMAAQITKRKWEAAHEAEQLRAYLDGTCVEWLRRYLENGKETLQRTDPPKTHMTHHPISDHEATLRCWALGFYPAEITLTWQRDGEDQTQDTELVETRPAGDGTFQKWAAVVVPSGEEQRYTCHVQHEGLPKPLTLRWEL

SEQ ID NO: 55 - protein, 276 aa, Artificial sequence; identical to SEQ ID NO: 49
  synthetic sequence

SEQ ID NO: 56 - protein, 276 aa, Artificial sequence
  synthetic sequence
GSHSMRYFSTSVSRPGRGEPRFIAVGYVDDTQFVRFDSDAASQRMEPRAPWIEQEGPEYWDEETGKVKAHSQTDRENLRIALRYYNQSEAGSHTLQMMFGCDVGSDGRFLRGYHQYAYDGKDYIALKEDLRSWTAADMAAQITQRKWEAARVAEQLRAYLEGTCVDGLRRYLENGKETLQRTDPPKTHMTHHPISDHEATLRCWALGFYPAEITLTWQRDGEDQTQDTELVETRPAGDGTFQKWAAVVVPSGEEQRYTCHVQHEGLPKPLTLRWEP

SEQ ID NO: 57 - protein, 276 aa, Artificial sequence; identical to SEQ ID NO: 50
  synthetic sequence

SEQ ID NO: 58 - protein, 276 aa, Artificial sequence
  synthetic sequence
GSHSMRYFSTSVSRPGRGEPRFIAVGYVDDTQFVRFDSDAASQRMEPRAPWIEQEGPEYWDEETGKVKAQSQTDRENLRIALRYYNQSEAGSHTLQMMFGCDVGSDGRFLRGYHQYAYDGKDYIALKEDLRSWTAADMAAQITKRKWEAAHVAEQQRAYLEGTCVDGLRRYLENGKETLQRTDPPKTHMTHHPISDHEATLRCWALGFYPAEITLTWQRDGEDQTQDTELVETRPAGDGTFQKWAAVVVPSGEEQRYTCHVQHEGLPKPLTLRWEP

SEQ ID NO: 59 - protein, 276 aa, Artificial sequence; identical to SEQ ID NO: 51
  synthetic sequence

SEQ ID NO: 60 - protein, 276 aa, Artificial sequence
  synthetic sequence
GSHSMRYFYTSVSRPGRGEPRFIAVGYVDDTQFVRFDSDAASQRMEPRAPWIEQEGPEYWDRNTRKVKAQSQTDRVDLGTLRGYYNQSEDGSHTIQRMYGCDVGPDGRFLRGYQQDAYDGKDYIALNEDLRSWTAADMAAQITQRKWETAHEAEQWRAYLEGTCVEWLRRYLENGKETLQRTDAPKTHMTHHAVSDHEATLRCWALSFYPAEITLTWQRDGEDQTQDTELVETRPAGDGTFQKWASVVVPSGQEQRYTCHVQHEGLPKPLTLRWEP

SEQ ID NO: 61 - protein, 276 aa, Artificial sequence
  synthetic sequence
  Misc_feature (9)..(9): X is phenylalanine, tyrosine, serine, or threonine
  Misc_feature (44)..(44): X is lysine or arginine
  Misc_feature (62)..(62): X is glutamine, glycine, glutamic acid, or arginine
  Misc_feature (63)..(63): X is asparagine or glutamic acid
  Misc_feature (65)..(65): X is arginine or glycine
  Misc_feature (66)..(66): X is asparagine or lysine
  Misc_feature (67)..(67): X is methionine or valine
  Misc_feature (70)..(70): X is histidine or glutamine
  Misc_feature (73)..(73): X is threonine or isoleucine
  Misc_feature (74)..(74): X is aspartic acid or histidine
  Misc_feature (76)..(76): X is alanine, valine, or glutamic acid
  Misc_feature (77)..(77): X is asparagine or aspartic acid
  Misc_feature (79)..(79): X is glycine or arginine
  Misc_feature (80)..(80): X is threonine or arginine
  Misc_feature (81)..(81): X is leucine or alanine
  Misc_feature (82)..(82): X is arginine or leucine
  Misc_feature (83)..(83): X is glycine ir arginine
  Misc_feature (90)..(90): X is alanine or aspartic acid
  Misc_feature (95)..(95): X is isoleucine, leucine, or valine
  Misc_feature (97)..(97): X is isoleucine, arginine, or methionine
  Misc_feature (99)..(99): X is phenylalanine or tyrosine
  Misc_feature (105)..(105): X is serine or proline
  Misc_feature (107)..(107): X is tryptophan or glycine
  Misc_feature (114)..(114): X is arginine, histidine, or glutamine
  Misc_feature (116)..(116): X is aspartic acid or tyrosine
  Misc_feature (127)..(127): X is asparagine or lysine
  Misc_feature (142)..(142): X is threonine or isoleucine
  Misc_feature (144)..(144): X is lysine or glutamine
  Misc_feature (145)..(145): X is arginine or histidine
  Misc_feature (149)..(149): X is alanine or threonine
  Misc_feature (150)..(150): X is alanine or valine
  Misc_feature (151)..(151): X is histidine or arginine
  Misc_feature (156)..(156): X is arginine, leucine, glutamine, or tryptophan
  Misc_feature (158)..(158): X is valine or alanine
  Misc_feature (161)..(161): X is aspartic acid or glutamic acid
  Misc_feature (163)..(163): X is arginine or threonine
  Misc_feature (166)..(166): X is aspartic acid or glutamic acid
  Misc_feature (167)..(167): X is tryptophan or glycine
  Misc_feature (184)..(184): X is proline or alanine
  Misc_feature (193)..(193): X is proline or alanine
  Misc_feature (194)..(194): X is valine or isoleucine
  Misc_feature (207)..(207): X is serine or glycine
  Misc_feature (246)..(246): X is alanine or serine
  Misc_feature (253)..(253): X is glutamine or glutamic acid
  Misc_feature (276)..(276): X is proline or leucine
GSHSMRYFXTSVSRPGRGEPRFIAVGYVDDTQFVRFDSDAASQXMEPRAPWIEQEGPEYWDXXTXXXKAXSQXXRXXLXXXXXYYNQSEXGSHTXQXMXGCDVGXDXRFLRGYXQXAYDGKDYIALXEDLRSWTAADMAAQXTXXKWEXXXEAEQXRXYLXGXCVXXLRRYLENGKETLQRTDXPKTHMTHHXXSDHEATLRCWALXFYPAEITLTWQRDGEDQTQDTELVETRPAGDGTFQKWAXVVVPSGXEQRYTCHVQHEGLPKPLTLRWEX

SEQ ID NO: 62 - protein, 276 aa, Artificial sequence [sequence omitted]

SEQ ID NO: 63 - protein, 276 aa, Artificial sequence
  synthetic sequence
GSHSMRYFDTAMSRPGRGEPRFISVGYVDDTQFVRFDSDAASPREEPRAPWIEQEGPEYWDRNTQIFKTNTQTDRESLRNLRGYYNQSEAGSHTLQSMYGCDVGPDGRLLRGHNQYAYDGKDYIALNEDLRSWTAADTAAQITQRKWEAARVAEQDRAYLEGTCVEWLRRYLENGKDTLERADPPKTHVTHHPISDHEATLRCWALGFYPAEITLTWQRDGEDQTQDTELVETRPAGDRTFQKWAAVVVPSGEEQRYTCHVQHEGLPKPLTLRWEP

SEQ ID NO: 64 - protein, 276 aa, Artificial sequence
  synthetic sequence
GSHSMRYFYTAMSRPGRGEPRFIAVGYVDDTQFVRFDSDAASPRMAPRAPWIEQEGPEYWDRNTQISKTNTQTYRESLRNLRGYYNQSEAGSHIIQRMYGCDVGPDGRLLRGYDQSAYDGKDYIALNEDLSSWTAADTAAQITQRKWEAAREAEQLRAYLEGLCVEWLRRYLENGKETLQRADPPKTHVTHHPISDHEATLRCWALGFYPAEITLTWQRDGEDQTQDTELVETRPAGDRTFQKWAAVVVPSGEEQRYTCHVQHEGLPKPLTLRWEP

SEQ ID NO: 65 - protein, 276 aa, Artificial sequence
  synthetic sequence
GSHSMRYFYTSVSRPGRGEPRFISVGYVDDTQFVRFDSDAASPREEPRAPWIEQEGPEYWDRNTQICKTNTQTYRENLRTALRYYNQSEAGSHTLQRMYGCDVGPDGRLLRGHNQFAYDGKDYIALNEDLSSWTAADTAAQITQRKWEAARVAEQLRTYLEGTCVEWLRRYLENGKETLQRADPPKTHVTHHPISDHEATLRCWALGFYPAEITLTWQRDGEDQTQDTELVETRPAGDRTFQKWAAVVVPSGEEQRYTCHVQHEGLPKPLTLRWEP

SEQ ID NO: 66 - protein, 276 aa, Artificial sequence
  synthetic sequence
GSHSMRYFHTAMSRPGRGEPRFITVGYVDDTLFVRFDSDATSPRKEPRAPWIEQEGPEYWDRETQISKTNTQTYRESLRNLRGYYNQSEAGSHTLQRMYGCDVGPDGRLLRGHNQYAYDGKDYIALNEDLRSWTAADTAAQISQRKLEAARVAEQLRAYLEGECVEWLRRYLENGKDKLERADPPKTHVTHHPISDHEATLRCWALGFYPAEITLTWQRDGEDQTQDTELVETRPAGDRTFQKWAAVVVPSGEEQRYTCHVQHEGLPKPLTLRWEP

SEQ ID NO: 67 - protein, 276 aa, Artificial sequence
  synthetic sequence
GSHSMRYFYTAMSRPGRGEPRFIAVGYVDDTQFVRFDSDAASPRMAPRAPWIEQEGPEYWDRETQKYKRQAQTDRVSLRNLRGYYNQSEAGSHTLQRMYGCDVGPDGRLLRGHDQSAYDGKDYIALNEDLSSWTAADTAAQITQRKWEAAREAEQWRAYLEGLCVEWLRRYLENGKETLQRADPPKTHVTHHPISDHEATLRCWALGFYPAEITLTWQRDGEDQTQDTELVETRPAGDRTFQKWAAVVVPSGEEQRYTCHVQHEGLPKPLTLRWEP

SEQ ID NO: 68 - protein, 276 aa, Artificial sequence
  synthetic sequence
GSHSMRYFYTAMSRPGRGEPRFIAVGYVDDTQFVRFDSDAASPRTEPRAPWIEQEGPEYWDRNTQIFKTNTQTYRENLRIALRYYNQSEAGSHIIQRMYGCDLGPDGRLLRGHDQSAYDGKDYIALNEDLSSWTAADTAAQITQRKWEAARVAEQLRAYLEGLCVEWLRRYLENGKETLQRADPPKTHVTHHPVSDHEATLRCWALGFYPAEITLTWQRDGEDQTQDTELVETRPAGDRTFQKWAAVVVPSGEEQRYTCHVQHEGLPKPLTLRWEP

SEQ ID NO: 69 - protein, 276 aa, Artificial sequence
  synthetic sequence
  Misc_feature (9)..(9): X is histidine, tyrosine, or aspartic acid
  Misc_feature (11)..(11): X is alanine or serine
  Misc_feature (12)..(12): X is methionine or valine
  Misc_feature (24)..(24): X is alanine, serine, or threonine
  Misc_feature (32)..(32): X is glutamine or leucine
  Misc_feature (41)..(41): X is alanine or threonine
  Misc_feature (45)..(45): X is glutamic acid, methionine, lysine, or threonine
  Misc_feature (46)..(46): X is alanine or threonine
  Misc_feature (63)..(63): X is glutamic acid or asparagine
  Misc_feature (66)..(66): X is isoleucine or lysine
  Misc_feature (67)..(67): X is tyrosine, phenylalanie, serine, or cystine
  Misc_feature (70)..(70): X is asparagine or glutamine
  Misc_feature (71)..(71): X is alanine or threonine
  Misc_feature (74)..(74): X is aspartic acid or tyrosine
  Misc_feature (76)..(76): X is glutamic acid or valine
  Misc_feature (77)..(77): X is serine or asparagine
  Misc_feature (80)..(80): X is threonine, asparagine, or isoleucine
  Misc_feature (81)..(81): X is alanine or leucine
  Misc_feature (82)..(82): X is leucine or arginine
  Misc_feature (83)..(83): X is arginine or glycine
  Misc_feature (94)..(94): X is threonine or isoleucine
  Misc_feature (95)..(95): X is leucine or isoleucine
  Misc_feature (97)..(97): X is arginine or serine
  Misc_feature (131)..(131): X is arginine or serine
  Misc_feature (143)..(143): X is S or T
  Misc_feature (147)..(147): X is L or W
  misc_feature (152)..(152): Xaa is E OR V
  misc_feature (156)..(156): Xaa is R, D, L
  misc_feature (158)..(158): Xaa A or T
  Misc_feature (163)..(163): X is leucine, glutamic acid, or threonine
  Misc_feature (177)..(177): X is glutamic acid or aspartic acid
  Misc_feature (178)..(178): X is lysine or threonine
  Misc_feature (180)..(180): X is glutamic acid or glutamine
  Misc_feature (194)..(194): X is isoleucine or valine
GSHSMRYFXTXXSRPGRGEPRFIXVGYVDDTXFVRFDSDAXSPRXXPRAPWIEQEGPEYWDRXTQXXKTXXTQXYXXNLXXXXYYNQSEAGSHXXQXMYGCDLGPDGRLLRGHDQSAYDGKDYIALNEDLXSWTAADTAAQIXQRKXEAARXAEQXRXYLEGXCVEWLRRYLENGKXXLXRADPPKTHVTHHPXSDHEATLRCWALGFYPAEITLTWQRDGEDQTQDTELVETRPAGDRTFQKWAAVVVPSGEEQRYTCHVQHEGLPKPLTLRWEP

SEQ ID NO: 70 - protein, 276 aa, Artificial sequence
  synthetic sequence
CSHSMKYFFTSVSRPGRGEPRFISVGYVDDTQFVRFDSDAASPRGEPRAPWVEQEGPEYWDRETQKYKRQAQTDRVSLRNLRGYYNQSEAGSHTLQWMCGCDLGPDGRLLRGYDQYAYDGKDYIALNEDLRSWTAADTAAQITQRKWEAAREAEQRRAYLEGTCVEWLRRYLENGKETLQRAEHPKTHVTHHPVSDHEATLRCWALGFYPAEITLTWQWDGEDQTQDTELVETRPAGDGTFQKWAAVMVPSGEEQRYTCHVQHEGLPEPLTLRWEP

SEQ ID NO: 71 - protein, 276 aa, Artificial sequence
  synthetic sequence
GSHSMRYFYTAVSRPGRGEPHFIAVGYVDDTQFVRFDSDAASPRGEPRAPWVEQEGPEYWDRETQKYKRQAQTDRVSLRNLRGYYNQSEARSHIIQRMYGCDVGPDGRLLRGYDQYAYDGKDYIALNEDLRSWTAADTAAQITQRKWEAAREAEQLRAYLEGLCVEWLRRYLKNGKETLQRAEHPKTHVTHHPVSDHEATLRCWALGFYPAEITLTWQWDGEDQTQDTELVETRPAGDGTFQKWAAVVVPSGEEQRYTCHVQHEGLPEPLTLRWEP

SEQ ID NO: 72 - protein, 276 aa, Artificial sequence
  synthetic sequence
GSHSMRYFYTAVSRPGRGEPHFIAVGYVDDTQFVRFDSDAASPRGEPRAPWVEQEGPEYWDRETQKYKRQAQTDRVSLRNLRGYYNQSEAGSHIIQRMYGCDVGPDGRLLRGYDQYAYDGKDYIALNEDLRSWTAADTAAQITQRKWEAAREAEQLRAYLEGLCVEWLRRYLKNGKETLQRAEHPKTHVTHHPVSDHEATLRCWALGFYPAEITLTWQWDGEDQTQDTELVETRPAGDGTFQKWAAVVVPSGEEQRYTCHVQHEGLPEPLTLRWEP

SEQ ID NO: 73 - protein, 276 aa, Artificial sequence
  synthetic sequence
GSHSMRYFSTSVSWPGRGEPRFIAVGYVDDTQFVRFDSDAASPRGEPREPWVEQEGPEYWDRETQKYKRQAQADRVNLRKLRGYYNQSEDGSHTLQRMFGCDLGPDGRLLRGYNQFAYDGKDYIALNEDLRSWTAADTAAQITQRKWEAAREAEQRRAYLEGTCVEWLRRYLENGKETLQRAEHPKTHVTHHPVSDHEATLRCWALGFYPAEITLTWQWDGEDQTQDTELVETRPAGDGTFQKWAAVVVPSGEEQRYTCHVQHEGLPEPLTLRWKP

SEQ ID NO: 74 - protein, 276 aa, Artificial sequence
  synthetic sequence
CSHSMRYFDTAVSRPGRGEPRFISVGYVDDTQFVRFDSDAASPRGEPRAPWVEQEGPEYWDRETQKYKRQAQADRVNLRKLRGYYNQSEDGSHTLQWMYGCDLGPDGRLLRGYDQSAYDGKDYIALNEDLRSWTAADTAAQITQRKWEAAREAEQWRAYLEGTCVEWLRRYLENGKETLQRAEHPKTHVTHHPVSDHEATLRCWALGFYPAEITLTWQRDGEDQTQDTELVETRPAGDGTFQKWAAVVVPSGEEQRYTCHVQHEGLPEPLTLRWEP

SEQ ID NO: 75 - protein, 276 aa, Artificial sequence
  synthetic sequence
CSHSMRYFDTAVSRPGRGEPRFISVGYVDDTQFVRFDSDAASPRGEPRAPWVEQEGPEYWDRETQNYKRQAQADRVSLRNLRGYYNQSEDGSHTLQRMYGCDLGPDGRLLRGYDQSAYDGKDYIALNEDLRSWTAADTAAQITQRKLEAARAAEQLRAYLEGTCVEWLRRYLENGKETLQRAEPPKTHVTHHPLSDHEATLRCWALGFYPAEITLTWQRDGEDQTQDTELVETRPAGDGTFQKWAAVVVPSGQEQRYTCHMQHEGLQEPLTLSWEP

SEQ ID NO: 76 - protein, 276 aa, Artificial sequence
  synthetic sequence
CSHSMRYFDTAVSRPGRGEPRFISVGYVDDTQFVRFDSDAASPRGEPRAPWVEQEGPEYWDRETQKYKRQAQADRVSLRNLRGYYNQSEDGSHTLQRMSGCDLGPDGRLLRGYDQSAYDGKDYIALNEDLRSWTAADTAAQITQRKLEAARAAEQLRAYLEGTCVEWLRRYLENGKETLQRAEPPKTHVTHHPLSDHEATLRCWALGFYPAEITLTWQRDGEDQTQDTELVETRPAGDGTFQKWAAVVVPSGQEQRYTCHMQHEGLQEPLTLSWEP

SEQ ID NO: 77 - protein, 276 aa, Artificial sequence
  synthetic sequence
CSHSMRYFYTAVSRPGRGEPRFIAVGYVDDTQFVQFDSDAASPRGEPRAPWVEQEGPEYWDRETQKYKRQAQTDRVSLRNLRGYYNQSEAGSHTLQRMYGCDLGPDGRLLRGYNQFAYDGKDYIALNEDLRSWTAADTAAQITQRKWEAARTAEQLRAYLEGTCVEWLRRYLENGKKTLQRAEHPKTHVTHHPVSDHEATLRCWALGFYPAEITLTWQRDGEDQTQDTELVETRPAGDGTFQKWAAVVVPSGEEQRYTCHVQHEGLPEPLTLRWGP

SEQ ID NO: 78 - protein, 276 aa, Artificial sequence
  synthetic sequence
CSHSMRYFYTAVSRPGRGEPHFIAVGYVDDTQFVRFDSDAASPRGEPRAPWVEQEGPEYWDRETQNYKRQAQTDRVNLRKLRGYYNQSEAGSHIIQRMYGCDLGPDGRLLRGHDQLAYDGKDYIALNEDLRSWTAADTAAQITQRKWEAAREAEQLRAYLEGTCVEWLRRYLENGKETLQRAEHPKTHVTHHPVSDHEATLRCWALGFYPAEITLTWQRDGEDQTQDTELVETRPAGDGTFQKWAAVVVPSGEEQRYTCHVQHEGLPEPLTLRWEP

SEQ ID NO: 79 - protein, 276 aa, Artificial sequence
  synthetic sequence
  Misc_feature (1)..(1): X is cysteine or glycine
  Misc_feature (6)..(6): X is arginine or lysine
  Misc_feature (9)..(9): X is phenylalanine, tyrosine, serine, or aspartic acid
  Misc_feature (14)..(14): X is arginine or tryptophan
  Misc_feature (21)..(21): X is histidine or arginine
  Misc_feature (24)..(24): X is alanine or serine
  Misc_feature (35)..(35): X is glutamine or arginine
  Misc_feature (49)..(49): X is alanine or arginine
  Misc_feature (66)..(66): X is asparagine, or lysine
  Misc_feature (73)..(73): X is threonine or alanine
  Misc_feature (77)..(77): X is serine or asparagine
  Misc_feature (80)..(80): X is asparagine or lysine
  Misc_feature (90)..(90): X is alanine or aspartic acid
  Misc_feature (91)..(91): X is glycine or arginine
  Misc_feature (94)..(94): X is threonine or isoleucine
  Misc_feature (95)..(95): X is leucine or isoleucine
  Misc_feature (97)..(97): X is tryptophan or arginine
  Misc_feature (99)..(99): X is cysteine, tyrosine, phenylalanine, or serine
  Misc_feature (103)..(103): X is leucine or valine
  Misc_feature (113)..(113): X is tyrosine or histidine
  Misc_feature (114)..(114): X is aspartic acid or asparagine
  Misc_feature (116)..(116): X is tyrosine, phenylalanine, serine, or leucine
  Misc_feature (147)..(147): X is leucine or tryptophan
  Misc_feature (152)..(152): X is glutamic acid, alanine, or threonine
  Misc_feature (156)..(156): X is arginine, leucine, or tryptophan
  Misc_feature (163)..(163): X is leucine or threonine
  Misc_feature (173)..(173): X is glutamic acid or lysine
  Misc_feature (177)..(177): X is glutamic acid or lysine
  Misc_feature (184)..(184): X is histidine or proline
  Misc_feature (194)..(194): X is arginine or valine
  Misc_feature (219)..(219): X is tryptophan or arginine
  Misc_feature (248)..(248): X is valine or methionine
  Misc_feature (253)..(253): X is glutamic acid or lysine
  Misc_feature (261)..(261): X is methionine or valine
  Misc_feature (267)..(267): X is proline or glutamine
  Misc_feature (273)..(273): X is arginine or serine
  Misc_feature (275)..(275): X is proline or glycine
XSHSMXYFXTAVSXPGRGEPXFIXVGYVDDTQFVXFDSDAASPRGEPRXPWVEQEGPEYWDRETQXYKRQAQXDRVXLRXLRGYYNQSEXXSHXXQXMXGCDXGPDGRLLRGXXQXAYDGKDYIALNEDLRSWTAADTAAQITQRKXEAARXAEQXRAYLEGXCVEWLRRYLXNGKXTLQRAEXPKTHVTHHPXSDHEATLRCWALGFYPAEITLTWQXDGEDQTQDTELVETRPAGDGTFQKWAAVXVPSGXEQRYTCHXQHEGLXEPLTLXWXP

SEQ ID NO: 80 - protein, 284 aa, Artificial sequence
  synthetic sequence
  misc_feature (89)..(89): Xaa is K or E
  misc_feature (107)..(107): Xaa is R or G
  misc_feature (157)..(157): Xaa is R or G
  misc_feature (158)..(158): Xaa is A or V
  misc_feature (255)..(255): Xaa is Q or P
  misc_feature (267)..(267): Xaa is P or S
GSHSLKYFHTSVSRPGRGEPRFISVGYVDDTQFVRFDNDAASPRMVPRAPWMEQEGSEYWDRETRSARDTAQIFRVNLRTLRGYYNQSXAGSHTLQWMHGCELGPDXRFLRGYEQFAYDGKDYLTLNEDLRSWTAVDTAAQISEQKSNDASEAEHQXXYLEDTCVEWLHKYLEKGKETLLHLEPPKTHVTHHPISDHEATLRCWALGFYPAEITLTWQQDGEGHTQDTELVETRPAGDGTFQKWAAVVVPSGEEXRYTCHVQHEGLXEPVTLRWKPASQPTIPI

SEQ ID NO: 81 - protein, 284 aa, Artificial sequence
  synthetic sequence
  misc_feature (7)..(7): Xaa is Y or F
  misc_feature (50)..(50): Xaa is P or Q
  misc_feature (251)..(251): Xaa is S or P
  misc_feature (278)..(278): Xaa is P or L
GSHSLRXFSTAVSRPGRGEPRYIAVEYVDDTQFLRFDSDAAIPRMEPREXWVEQEGPQYWEWTTGYAKANAQTDRVALRNLLRRYNQSEAGSHTLQGMNGCDMGPDGRLLRGYHQHAYDGKDYISLNEDLRSWTAADTVAQITQRFYEAEEYAEEFRTYLEGECLELLRRYLENGKETLQRADPPKAHVAHHPISDHEATLRCWALGFYPAEITLTWQRDGEEQTQDTELVETRPAGDGTFQKWAAVVVPXGEEQRYTCHVQHEGLPQPLILRWEQSXQPTIPI

SEQ ID NO: 82 - protein, 284 aa, Artificial sequence
  synthetic sequence
  misc_feature (13)..(13): Xaa is S or F
  misc_feature (27)..(27): Xaa is Y or H
  misc_feature (31)..(31): Xaa is T, S, or M
  misc_feature (34)..(34): Xaa is L or V
  misc_feature (54)..(54): Xaa is Q or R
  misc_feature (81)..(81): Xaa is P or L
  misc_feature (100)..(100): Xaa is G or D
  misc_feature (104)..(104): Xaa is G or V
  misc_feature (105)..(105): Xaa is S or C
  misc_feature (110)..(110): Xaa is L or I
  misc_feature (159)..(159): Xaa is Y or H
  misc_feature (169)..(169): Xaa is H or R
  misc_feature (171)..(171): Xaa is Y or H
  misc_feature (178)..(178): Xaa is M or T
  misc_feature (185)..(185): Xaa is P or A
  misc_feature (219)..(219): Xaa is R, W, or Q
  misc_feature (258)..(258): Xaa is T or M
  misc_feature (275)..(275): Xaa is K or E
GSHSMRYFSAAVXRPGRGEPRFIAMGXVDDXQFXRFDSDSACPRMEPRAPWVEXEGPEYWEEETRNTKAHAQTDRMNLQTXRGYYNQSEASSHTLQWMIXCDLXXDGRLXRGYEQYAYDGKDYLALNEDLRSWTAADTAAQISKRKCEAANVAEQRRAXLEGTCVEWLXRXLENGKEXLQRADPXKTHVTHHPVFDYEATLRCWALGFYPAEIILTWQXDGEDQTQDVELVETRPAGDGTFQKWAAVVVPSGEEQRYXCHVQHEGLPEPLMLRWXQSSLPTIPI

SEQ ID NO: 83 - protein, 276 aa, Artificial sequence; identical to SEQ ID NO: 61
  synthetic sequence
  Misc_feature (9)..(9): X is phenylalanine, tyrosine, serine, or threonine
  Misc_feature (44)..(44): X is lysine or arginine
  Misc_feature (62)..(62): X is glutamine, glycine, glutamic acid, or arginine
  Misc_feature (63)..(63): X is asparagine or glutamic acid
  Misc_feature (65)..(65): X is arginine or glycine
  Misc_feature (66)..(66): X is asparagine or lysine
  Misc_feature (67)..(67): X is methionine or valine
  Misc_feature (70)..(70): X is histidine or glutamine
  Misc_feature (73)..(73): X is threonine or isoleucine
  Misc_feature (74)..(74): X is aspartic acid or histidine
  Misc_feature (76)..(76): X is alanine, valine, or glutamic acid
  Misc_feature (77)..(77): X is asparagine or aspartic acid
  Misc_feature (79)..(79): X is glycine or arginine
  Misc_feature (80)..(80): X is threonine or arginine
  Misc_feature (81)..(81): X is leucine or alanine
  Misc_feature (82)..(82): X is arginine or leucine
  Misc_feature (83)..(83): X is glycine ir arginine
  Misc_feature (90)..(90): X is alanine or aspartic acid
  Misc_feature (95)..(95): X is isoleucine, leucine, or valine
  Misc_feature (97)..(97): X is isoleucine, arginine, or methionine
  Misc_feature (99)..(99): X is phenylalanine or tyrosine
  Misc_feature (105)..(105): X is serine or proline
  Misc_feature (107)..(107): X is tryptophan or glycine
  Misc_feature (114)..(114): X is arginine, histidine, or glutamine
  Misc_feature (116)..(116): X is aspartic acid or tyrosine
  Misc_feature (127)..(127): X is asparagine or lysine
  Misc_feature (142)..(142): X is threonine or isoleucine
  Misc_feature (144)..(144): X is lysine or glutamine
  Misc_feature (145)..(145): X is arginine or histidine
  Misc_feature (149)..(149): X is alanine or threonine
  Misc_feature (150)..(150): X is alanine or valine
  Misc_feature (151)..(151): X is histidine or arginine
  Misc_feature (156)..(156): X is arginine, leucine, glutamine, or tryptophan
  Misc_feature (158)..(158): X is valine or alanine
  Misc_feature (161)..(161): X is aspartic acid or glutamic acid
  Misc_feature (163)..(163): X is arginine or threonine
  Misc_feature (166)..(166): X is aspartic acid or glutamic acid
  Misc_feature (167)..(167): X is tryptophan or glycine
  Misc_feature (184)..(184): X is proline or alanine
  Misc_feature (193)..(193): X is proline or alanine
  Misc_feature (194)..(194): X is valine or isoleucine
  Misc_feature (207)..(207): X is serine or glycine
  Misc_feature (246)..(246): X is alanine or serine
  Misc_feature (253)..(253): X is glutamine or glutamic acid
  Misc_feature (276)..(276): X is proline or leucine

SEQ ID NO: 84 - protein, 276 aa, Artificial sequence; identical to SEQ ID NO: 69
  synthetic sequence
  Misc_feature (9)..(9): X is histidinem tyrosine, or aspartic acid
  Misc_feature (11)..(11): X is alanine or serine
  Misc_feature (12)..(12): X is methionine or valine
  Misc_feature (24)..(24): X is alanine, serine, or threonine
  Misc_feature (32)..(32): X is glutamie or leucine
  Misc_feature (41)..(41): X is alanine or threonine
  Misc_feature (45)..(45): X is glutamic acid, methionine, lysine, or threonine
  Misc_feature (46)..(46): X is alanine or threonine
  Misc_feature (63)..(63): X is glutamic acid or asparagine
  Misc_feature (66)..(66): X is isoleucine or lysine
  Misc_feature (67)..(67): X is tyrosine, phenylalanie, serine, or cystine
  Misc_feature (70)..(70): X is asparagine or glutamine
  Misc_feature (71)..(71): X is alanine or threonine
  Misc_feature (74)..(74): X is aspartic acid or tyrosine
  Misc_feature (76)..(76): X is glutamic acid or valine
  Misc_feature (77)..(77): X is serine or asparagine
  Misc_feature (80)..(80): X is threonine, asparagine, or isoleucine
  Misc_feature (81)..(81): X is alanine or leucine
  Misc_feature (82)..(82): X is leucine or arginine
  Misc_feature (83)..(83): X is arginine or glycine
  Misc_feature (94)..(94): X is threonine or isoleucine
  Misc_feature (95)..(95): X is leucine or isoleucine
  Misc_feature (97)..(97): X is arginine or serine
  Misc_feature (131)..(131): X is arginine or serine
  Misc_feature (143)..(143): X is S or T
  Misc_feature (147)..(147): X is L or W
  misc_feature (152)..(152): Xaa is E OR V
  misc_feature (156)..(156): Xaa is R, D, L
  misc_feature (158)..(158): Xaa A or T
  Misc_feature (163)..(163): X is leucine, glutamic acid, or threonine
  Misc_feature (177)..(177): X is glutamic acid or aspartic acid
  Misc_feature (178)..(178): X is lysine or threonine
  Misc_feature (180)..(180): X is glutamic acid or glutamine
  Misc_feature (194)..(194): X is isoleucine or valine

SEQ ID NO: 85 - protein, 276 aa, Artificial sequence; identical to SEQ ID NO: 79
  synthetic sequence
  Misc_feature (1)..(1): X is cysteine or glycine
  Misc_feature (6)..(6): X is arginine or lysine
  Misc_feature (9)..(9): X is phenylalanine, tyrosine, serine, or aspartic acid
  Misc_feature (14)..(14): X is arginine or tryptophan
  Misc_feature (21)..(21): X is histidine or arginine
  Misc_feature (24)..(24): X is alanine or serine
  Misc_feature (35)..(35): X is glutamine or arginine
  Misc_feature (49)..(49): X is alanine or arginine
  Misc_feature (66)..(66): X is asparagine, or lysine
  Misc_feature (73)..(73): X is threonine or alanine
  Misc_feature (77)..(77): X is serine or asparagine
  Misc_feature (80)..(80): X is asparagine or lysine
  Misc_feature (90)..(90): X is alanine or aspartic acid
  Misc_feature (91)..(91): X is glycine or arginine
  Misc_feature (94)..(94): X is threonine or isoleucine
  Misc_feature (95)..(95): X is leucine or isoleucine
  Misc_feature (97)..(97): X is tryptophan or arginine
  Misc_feature (99)..(99): X is cysteine, tyrosine, phenylalanine, or serine
  Misc_feature (103)..(103): X is leucine or valine
  Misc_feature (113)..(113): X is tyrosine or histidine
  Misc_feature (114)..(114): X is aspartic acid or asparagine
  Misc_feature (116)..(116): X is tyrosine, phenylalanine, serine, or leucine
  Misc_feature (147)..(147): X is leucine or tryptophan
  Misc_feature (152)..(152): X is glutamic acid, alanine, or threonine
  Misc_feature (156)..(156): X is arginine, leucine, or tryptophan
  Misc_feature (163)..(163): X is leucine or threonine
  Misc_feature (173)..(173): X is glutamic acid or lysine
  Misc_feature (177)..(177): X is glutamic acid or lysine
  Misc_feature (184)..(184): X is histidine or proline
  Misc_feature (194)..(194): X is arginine or valine
  Misc_feature (219)..(219): X is tryptophan or arginine
  Misc_feature (248)..(248): X is valine or methionine
  Misc_feature (253)..(253): X is glutamic acid or lysine
  Misc_feature (261)..(261): X is methionine or valine
  Misc_feature (267)..(267): X is proline or glutamine
  Misc_feature (273)..(273): X is arginine or serine
  Misc_feature (275)..(275): X is proline or glycine

SEQ ID NO: 86 - protein, 284 aa, Artificial sequence; identical to SEQ ID NO: 80
  synthetic sequence
  misc_feature (89)..(89): Xaa is K or E
  misc_feature (107)..(107): Xaa is R or G
  misc_feature (157)..(157): Xaa is R or G
  misc_feature (158)..(158): Xaa is A or V
  misc_feature (255)..(255): Xaa is Q or P
  misc_feature (267)..(267): Xaa is P or S

SEQ ID NO: 87 - protein, 284 aa, Artificial sequence; identical to SEQ ID NO: 81
  synthetic sequence
  misc_feature (7)..(7): Xaa is Y or F
  misc_feature (50)..(50): Xaa is P or Q
  misc_feature (251)..(251): Xaa is S or P
  misc_feature (278)..(278): Xaa is P or L

SEQ ID NO: 88 - protein, 284 aa, Artificial sequence; identical to SEQ ID NO: 82
  synthetic sequence
  misc_feature (13)..(13): Xaa is S or F
  misc_feature (27)..(27): Xaa is Y or H
  misc_feature (31)..(31): Xaa is T, S, or M
  misc_feature (34)..(34): Xaa is L or V
  misc_feature (54)..(54): Xaa is Q or R
  misc_feature (81)..(81): Xaa is P or L
  misc_feature (100)..(100): Xaa is G or D
  misc_feature (104)..(104): Xaa is G or V
  misc_feature (105)..(105): Xaa is S or C
  misc_feature (110)..(110): Xaa is L or I
  misc_feature (159)..(159): Xaa is Y or H
  misc_feature (169)..(169): Xaa is H or R
  misc_feature (171)..(171): Xaa is Y or H
  misc_feature (178)..(178): Xaa is M or T
  misc_feature (185)..(185): Xaa is P or A
  misc_feature (219)..(219): Xaa is R, W, or Q
  misc_feature (258)..(258): Xaa is T or M
  misc_feature (275)..(275): Xaa is K or E

SEQ ID NO: 89 - protein, 763 aa, Artificial sequence
  synthetic sequence
GSHSMRYFFTSVSRPGRGEPRFIAVGYVDDTQFVRFDSDAASQRMEPRAPWIEQEGPEYWDGETRKVKAHSQTHRVDLGTLRGAYNQSEAGSHTVQRMYGCDVGSDWRFLRGYHQYAYDGKDYIALKEDLRSWTAADMAAQTTKHKWEAAHVAEQLRAYLEGTCVEWLRRYLENGKETLQRTDAPKTHMTHHAVSDHEATLRCWALSFYPAEITLTWQRDGEDQTQDTELVETRPCGDGTFQKWAAVVVPSGQEQRYTCHVQHEGLPKPLTLRWEAAAGGDKTHTCPPCPAPEAAGGPSVFLFPPKPKDTLMISRTPEVTCVVVDVSHEDPEVKFNWYVDGVEVHNAKTKPREEQYNSTYRVVSVLTVLHQDWLNGKEYKCKVSNKALPAPIEKTISKAKGQPREPQVYTLPPSREEMTKNQVSLTCLVKGFYPSDIAVEWESNGQPENNYKTTPPVLDSDGSFFLYSKLTVDKSRWQQGNVFSCSVMHEALHNHYTQKSLSLSPGGGGGSGGGGSGGGGSEVQLVESGGGLVQPGGSLRLSCAASGFNIKDTYIHWVRQAPGKGLEWVARIYPTNGYTRYADSVKGRFTISADTSKNTAYLQMNSLRAEDTAVYYCSRWGGDGFYAMDYWGQGTLVTVSSGGGGSGGGGSGGGGSDIQMTQSPSSLSASVGDRVTITCRASQDVNTAVAWYQQKPGKAPKLLIYSASFLYSGVPSRFSGSRSGTDFTLTISSLQPEDFATYYCQQHYTTPPTFGQGTKVEIK

SEQ ID NO: 90 - protein, 8 aa, Artificial sequence
  synthetic sequence
  misc_feature (1)..(8): Xaa can be any naturally occurring amino acid
XXXXXXXX

SEQ ID NO: 91 - protein, 8 aa, Artificial sequence
  synthetic sequence
  misc_feature (1)..(8): Xaa can be any naturally occurring amino acid
XXXXXXXX

SEQ ID NO: 92 - protein, 8 aa, Artificial sequence
  synthetic sequence
  misc_feature (1)..(8): Xaa can be any naturally occurring amino acid
XXXXXXXX

SEQ ID NO: 93 - protein, 8 aa, Artificial sequence
  synthetic sequence
  misc_feature (1)..(1): Xaa can be attached to a peptide
  misc_feature (2)..(8): Xaa can be any naturally occurring amino acid
XXXXXXXX

SEQ ID NO: 94 - protein, 8 aa, Artificial sequence
  synthetic sequence
  misc_feature (1)..(1): Xaa can be attached to a peptide
  misc_feature (2)..(8): Xaa can be any naturally occurring amino acid
XXXXXXXX

SEQ ID NO: 95 - protein, 8 aa, Artificial sequence
  synthetic sequence
  misc_feature (1)..(8): Xaa can be any naturally occurring amino acid
XXXXXXXX

SEQ ID NO: 96 - protein, 8 aa, Artificial sequence
  synthetic sequence
  misc_feature (1)..(8): Xaa can be any naturally occurring amino acid
XXXXXXXX

SEQ ID NO: 97 - protein, 8 aa, Artificial sequence
  synthetic sequence
  misc_feature (1)..(8): Xaa can be any naturally occurring amino acid
XXXXXXXX

SEQ ID NO: 98 - protein, 5 aa, Artificial sequence
  synthetic sequence
GTLRG

SEQ ID NO: 99 - protein, 5 aa, Artificial sequence
  synthetic sequence
YNQSE

SEQ ID NO: 100 - protein, 5 aa, Artificial sequence
  synthetic sequence
TAADM

SEQ ID NO: 101 - protein, 5 aa, Artificial sequence
  synthetic sequence
AQTTK

SEQ ID NO: 102 - protein, 5 aa, Artificial sequence
  synthetic sequence
VETRP

SEQ ID NO: 103 - protein, 5 aa, Artificial sequence
  synthetic sequence
GDGTF

SEQ ID NO: 104 - protein, 5 aa, Artificial sequence
  synthetic sequence
RNLRG

SEQ ID NO: 105 - protein, 5 aa, Artificial sequence
  synthetic sequence
TAADT

SEQ ID NO: 106 - protein, 5 aa, Artificial sequence
  synthetic sequence
AQITQ

SEQ ID NO: 107 - protein, 5 aa, Artificial sequence
  synthetic sequence
GDRTF

SEQ ID NO: 108 - protein, 276 aa, Artificial sequence [sequence omitted]

SEQ ID NO: 109 - protein, 276 aa, Artificial sequence [sequence omitted]

SEQ ID NO: 110 - protein, 275 aa, Artificial sequence [sequence omitted]

SEQ ID NO: 111 - protein, 276 aa, Artificial sequence; identical to SEQ ID NO: 48
  synthetic sequence

SEQ ID NO: 112 - protein, 276 aa, Artificial sequence; identical to SEQ ID NO: 48
  synthetic sequence

SEQ ID NO: 113 - protein, 275 aa, Artificial sequence; identical to SEQ ID NO: 46
  synthetic sequence

SEQ ID NO: 114 - protein, 276 aa, Artificial sequence
  synthetic sequence
GSHSMRYFFTSVSRPGRGEPRFIAVGYVDDTQFVRFDSDAASQRMEPRAPWIEQEGPEYWDGETRKVKAHSQTHRVDLGTLRGCYNQSEAGSHTVQRMYGCDVGSDWRFLRGYHQYAYDGKDYIALKEDLRSWTAADMCAQTTKHKWEAAHVAEQLRAYLEGTCVEWLRRYLENGKETLQRTDAPKTHMTHHAVSDHEATLRCWALSFYPAEITLTWQRDGEDQTQDTELVETRPAGDGTFQKWAAVVVPSGQEQRYTCHVQHEGLPKPLTLRWEP

SEQ ID NO: 115 - protein, 275 aa, Artificial sequence
  synthetic sequence
GSHSMRYFYTSVSRPGRGEPRFIAVGYVDDTQFVRFDSDAASQRMEPRAPWIEQEGPEYWDQETRNVKAQSQTDRVDLGTLRGYYNQSEDGSHTIQIMYGCDVGPDGRFLRGYRQDAYDGKDYIALNEDLRSWTAADMAAQITKRKWEAAHAAEQQRAYLEGTCVEWLRRYLENGKETLQRTDPPKTHMTHHPISDHEATLRCWALGFYPAEITLTWQRDGEDQTQDTELVETRPAGDGTFQKWAAVVVPSGEEQRYTCHVQHEGLPKPLTLRWE

SEQ ID NO: 116 - protein, 275 aa, Artificial sequence
  synthetic sequence
GSHSMRYFYTSVSRPGRGEPRFIAVGYVDDTQFVRFDSDAASQRMEPRAPWIEQEGPEYWDQETRNVKAQSQTDRVDLGTLRGAYNQSEDGSHTIQIMYGCDVGPDGRFLRGYRQDAYDGKDYIALNEDLRSWTAADMAAQITKRKWEAAHAAEQQRAYLEGTCVEWLRRYLENGKETLQRTDPPKTHMTHHPISDHEATLRCWALGFYPAEITLTWQRDGEDQTQDTELVETRPCGDGTFQKWAAVVVPSGEEQRYTCHVQHEGLPKPLTLRWE

SEQ ID NO: 117 - protein, 341 aa, Artificial sequence
  synthetic sequence
GSHSMRYFSTSVSRPGRGEPRFIAVGYVDDTQFVRFDSDAASQRMEPRAPWIEQEGPEYWDEETGKVKAHSQTDRENLRIALRYYNQSEAGSHTLQMMFGCDVGSDGRFLRGYHQYAYDGKDYIALKEDLRSWTAADMAAQITKRKWEAAHVAEQQRAYLEGTCVDGLRRYLENGKETLQRTDPPKTHMTHHPISDHEATLRCWALGFYPAEITLTWQRDGEDQTQDTELVETRPAGDGTFQKWAAVVVPSGEEQRYTCHVQHEGLPKPLTLRWEPSSQPTVPIVGIIAGLVLLGAVITGAVVAAVMWRRNSSDRKGGSYSQAASSDSAQGSDVSLTACKV

SEQ ID NO: 118 - protein, 341 aa, Artificial sequence
  synthetic sequence
GSHSMRYFTTSVSRPGRGEPRFIAVGYVDDTQFVRFDSDAASQRMEPRAPWIEQEGPEYWDRNTRNVKAHSQIDRVDLGTLRGYYNQSEAGSHTIQMMYGCDVGSDGRFLRGYQQDAYDGKDYIALNEDLRSWTAADMAAQITQRKWEAARVAEQLRAYLEGTCVEWLRRYLENGKETLQRTDPPKTHMTHHAVSDHEATLRCWALSFYPAEITLTWQRDGEDQTQDTELVETRPAGDGTFQKWASVVVPSGQEQRYTCHVQHEGLPKPLTLRWEPSSQPTIPIVGIIAGLVLFGAVFAGAVVAAVRWRRKSSDRKGGSYSQAASSDSAQGSDMSLTACKV

SEQ ID NO: 119 - protein, 276 aa, Artificial sequence [sequence omitted]

SEQ ID NO: 120 - protein, 276 aa, Artificial sequence
  synthetic sequence
GSHSMRYFYTSVSRPGRGEPRFISVGYVDDTQFVRFDSDAASPREEPRAPWIEQEGPEYWDRNTQIYKAQAQTDRESLRNLRGAYNQSEAGSHTLQSMYGCDVGPDGRLLRGHDQYAYDGKDYIALNEDLRSWTAADTAAQITQRKWEAAREAEQRRAYLEGECVEWLRRYLENGKDKLERADPPKTHVTHHPISDHEATLRCWALGFYPAEITLTWQRDGEDQTQDTELVETRPCGDRTFQKWAAVVVPSGEEQRYTCHVQHEGLPKPLTLRWEP

SEQ ID NO: 121 - protein, 276 aa, Artificial sequence; identical to SEQ ID NO: 120
  synthetic sequence

SEQ ID NO: 122 - protein, 276 aa, Artificial sequence
  synthetic sequence
GSHSMRYFYTSVSRPGRGEPRFISVGYVDDTQFVRFDSDAASPREEPRAPWIEQEGPEYWDRNTQIYKAQAQTDRESLRNLRGCYNQSEAGSHTLQSMYGCDVGPDGRLLRGHDQYAYDGKDYIALNEDLRSWTAADTCAQITQRKWEAAREAEQRRAYLEGECVEWLRRYLENGKDKLERADPPKTHVTHHPISDHEATLRCWALGFYPAEITLTWQRDGEDQTQDTELVETRPAGDRTFQKWAAVVVPSGEEQRYTCHVQHEGLPKPLTLRWEP

SEQ ID NO: 123 - protein, 276 aa, Artificial sequence; identical to SEQ ID NO: 75
  synthetic sequence

SEQ ID NO: 124 - protein, 276 aa, Artificial sequence
  synthetic sequence
CSHSMRYFDTAVSRPGRGEPRFISVGYVDDTQFVRFDSDAASPRGEPRAPWVEQEGPEYWDRETQNYKRQAQADRVSLRNLRGAYNQSEDGSHTLQRMYGCDLGPDGRLLRGYDQSAYDGKDYIALNEDLRSWTAADTAAQITQRKLEAARAAEQLRAYLEGTCVEWLRRYLENGKETLQRAEPPKTHVTHHPLSDHEATLRCWALGFYPAEITLTWQRDGEDQTQDTELVETRPCGDGTFQKWAAVVVPSGQEQRYTCHMQHEGLQEPLTLSWEP

SEQ ID NO: 125 - protein, 276 aa, Artificial sequence
  synthetic sequence
CSHSMRYFDTAVSRPGRGEPRFISVGYVDDTQFVRFDSDAASPRGEPRAPWVEQEGPEYWDRETQNYKRQAQADRVSLRNLRGCYNQSEDGSHTLQRMYGCDLGPDGRLLRGYDQSAYDGKDYIALNEDLRSWTAADTCAQITQRKLEAARAAEQLRAYLEGTCVEWLRRYLENGKETLQRAEPPKTHVTHHPLSDHEATLRCWALGFYPAEITLTWQRDGEDQTQDTELVETRPAGDGTFQKWAAVVVPSGQEQRYTCHMQHEGLQEPLTLSWEP

SEQ ID NO: 126 - protein, 99 aa, Artificial sequence
  synthetic sequence
IQRTPKIQVYSCHPAENGKSNFLNCYVSGFHPSDIEVDLLKNGERIEKVEHSDLSFSKDWSFYLLYYTEFTPTEKDEYACRVNHVTLSQPKIVKWDRDM

SEQ ID NO: 127 - protein, 246 aa, Artificial sequence
  synthetic sequence
  MISC_FEATURE (78)..(79): 1-5 amino acid residues are present between the residues, wherein the amino acid residues are i) selected independently from any naturally occurring (e.g., encoded) amino acid or ii) any naturally occurring amino acid except proline or glycine
  MISC_FEATURE (79)..(80): 1-5 amino acid residues are present between the residues, wherein the amino acid residues are i) selected independently from any naturally occurring (e.g., encoded) amino acid or ii) any naturally occurring amino acid except proline or glycine
  MISC_FEATURE (123)..(124): 1-5 amino acid residues are present between the residues, wherein the amino acid residues are i) selected independently from any naturally occurring (e.g., encoded) amino acid or ii) any naturally occurring amino acid except proline or glycine
  MISC_FEATURE (124)..(125): 1-5 amino acid residues are present between the residues, wherein the amino acid residues are i) selected independently from any naturally occurring (e.g., encoded) amino acid or ii) any naturally occurring amino acid except proline or glycine
  MISC_FEATURE (210)..(211): 1-5 amino acid residues are present between the residues, wherein the amino acid residues are i) selected independently from any naturally occurring (e.g., encoded) amino acid or ii) any naturally occurring amino acid except proline or glycine
  MISC_FEATURE (211)..(212): 1-5 amino acid residues are present between the residues, wherein the amino acid residues are i) selected independently from any naturally occurring (e.g., encoded) amino acid or ii) any naturally occurring amino acid except proline or glycine
GSHSMRYFFTSVSRPGRGEPRFIAVGYVDDTQFVRFDSDAASQRMEPRAPWIEQEGPEYWDGETRKVKAHSQTHRVDLCAGSHTVQRMYGCDVGSDWRFLRGYHQYAYDGKDYIALKEDLRSWCHKWEAAHVAEQLRAYLEGTCVEWLRRYLENGKETLQRTDAPKTHMTHHAVSDHEATLRCWALSFYPAEITLTWQRDGEDQTQDTELIQKWAAVVVPSGQEQRYTCHVQHEGLPKPLTLRWEP

SEQ ID NO: 128 - protein, 99 aa, Artificial sequence [sequence omitted]

SEQ ID NO: 129 - protein, 99 aa, Artificial sequence; identical to SEQ ID NO: 126
  synthetic sequence

SEQ ID NO: 130 - protein, 276 aa, Artificial sequence [sequence omitted]

SEQ ID NO: 131 - protein, 276 aa, Artificial sequence
  synthetic sequence
GSHSMRYFFTSVSRPGRGEPRFIAVGYVDDTQFVRFDSDAASQRMEPRAPWIEQEGPEYWDGETRKVKAHSQTHRVDLGTLRGYYNQSEAGSHTVQRMYGCDVGSDWRFLRGYHQYAYDGKDYIALKEDLRSWTAADMAAQTTKHKWEAAHVAEQLRAYLEGTCVEWLRRYLENGKETLQRTDAPKTHMTHHAVSDHEATLRCWALSFYPAEITLTWQRDGEDQTQDTELVETRPCGDGTFQKWAAVVVPSGQEQRYTCHVQHEGLPKPLTLRWEP

SEQ ID NO: 132 - protein, 275 aa, Artificial sequence; identical to SEQ ID NO: 46
  synthetic sequence

SEQ ID NO: 133 - protein, 99 aa, Artificial sequence; identical to SEQ ID NO: 126
  synthetic sequence

SEQ ID NO: 134 - protein, 276 aa, Artificial sequence; identical to SEQ ID NO: 131
  synthetic sequence

SEQ ID NO: 135 - protein, 99 aa, Artificial sequence; identical to SEQ ID NO: 126
  synthetic sequence

SEQ ID NO: 136 - protein, 10 aa, Artificial sequence
  synthetic sequence
  MISC_FEATURE (1)..(5): The residues may be repeated 1, 2, 3, 4, 5, 6, 7, 8, or 9 times
GCGGSGGGGS

SEQ ID NO: 137 - protein, 20 aa, Artificial sequence
  synthetic sequence
GCGGSGGGGSGGGGSGGGGS

SEQ ID NO: 138 - protein, 15 aa, Artificial sequence
  synthetic sequence
GCGGSGGGGSGGGGS

SEQ ID NO: 139 - protein, 5 aa, Artificial sequence
  synthetic sequence
GCGGS

SEQ ID NO: 140 - protein, 10 aa, Artificial sequence
  synthetic sequence
  MISC_FEATURE (6)..(10): The residues may be repated 1, 2, 3, 4, 5, 6, 7, 8, 9, or 10 times
GCGGSGGGGS

SEQ ID NO: 141 - protein, 5 aa, Artificial sequence
  synthetic sequence
CGGGS

SEQ ID NO: 142 - protein, 10 aa, Artificial sequence
  synthetic sequence
  MISC_FEATURE (6)..(10): The residues may be repeated 1,2,3,4,5,6,7,8,9, or 10 times
CGGGSGGGGS

SEQ ID NO: 143 - protein, 276 aa, Artificial sequence
  synthetic sequence
GSHSMRYFFTSVSRPGRGEPRFIAVGYVDDTQFVRFDSDAASQRMEPRAPWIEQEGPEYWDGETRKVKAHSQTHRVDLGTLRGCYNQSEAGSHTVQRMYGCDVGSDWRFLRGYHQYAYDGKDYIALKEDLRSWTAADMAAQTTKHKWEAAHVAEQLRAYLEGTCVEWLRRYLENGKETLQRTDAPKTHMTHHAVSDHEATLRCWALSFYPAEITLTWQRDGEDQTQDTELVETRPCGDGTFQKWAAVVVPSGQEQRYTCHVQHEGLPKPLTLRWEP

SEQ ID NO: 144 - protein, 99 aa, Artificial sequence; identical to SEQ ID NO: 126
  synthetic sequence

SEQ ID NO: 145 - protein, 275 aa, Artificial sequence
  synthetic sequence
GSHSMRYFFTSVSRPGRGEPRFIAVGYVDDTQFVRFDSDAASQKMEPRAPWIEQEGPEYWDQETRNMKAHSQTDRANLGTLRGCYNQSEDGSHTIQIMYGCDVGPDGRFLRGYRQDAYDGKDYIALNEDLRSWTAADMAAQITKRKWEAVHAAEQRRVYLEGRCVDGLRRYLENGKETLQRTDPPKTHMTHHPISDHEATLRCWALGFYPAEITLTWQRDGEDQTQDTELVETRPCGDGTFQKWAAVVVPSGEEQRYTCHVQHEGLPKPLTLRWE

SEQ ID NO: 146 - protein, 276 aa, Artificial sequence; identical to SEQ ID NO: 143
  synthetic sequence

SEQ ID NO: 147 - protein, 275 aa, Artificial sequence
  synthetic sequence
GSHSMRYFFTSVSRPGRGEPRFIAVGYVDDTQFVRFDSDAASQRMEPRAPWIEQEGPEYWDGETRKVKAHSQTHRVDLGTLRGCYNQSEAGSHTVQRMYGCDVGSDWRFLRGYHQYAYDGKDYIALKEDLRSWTAADMAAQTTKHKWEAAHVAEQLRAYLEGTCVEWLRRYLENGKETLQRTDAPKTHMTHHAVSDHEATLRCWALSFYPAEITLTWQRDGEDQTQDTELVETRPCGDGTFQKWAAVVVPSGQEQRYTCHVQHEGLPKPLTLRWE

SEQ ID NO: 148 - protein, 275 aa, Artificial sequence
  synthetic sequence
GSHSMRYFYTSVSRPGRGEPRFIAVGYVDDTQFVRFDSDAASQRMEPRAPWIEQEGPEYWDQETRNVKAQSQTDRVDLGTLRGCYNQSEDGSHTIQIMYGCDVGPDGRFLRGYRQDAYDGKDYIALNEDLRSWTAADMAAQITKRKWEAAHAAEQQRAYLEGRCVEWLRRYLENGKETLQRTDPPKTHMTHHPISDHEATLRCWALGFYPAEITLTWQRDGEDQTQDTELVETRPCGDGTFQKWAAVVVPSGEEQRYTCHVQHEGLPKPLTLRWE

SEQ ID NO: 149 - protein, 275 aa, Artificial sequence
  synthetic sequence
GSHSMRYFSTSVSRPGRGEPRFIAVGYVDDTQFVRFDSDAASQRMEPRAPWIEQEGPEYWDEETGKVKAHSQTDRENLRIALRCYNQSEAGSHTLQMMFGCDVGSDGRFLRGYHQYAYDGKDYIALKEDLRSWTAADMAAQITQRKWEAARVAEQLRAYLEGTCVDGLRRYLENGKETLQRTDPPKTHMTHHPISDHEATLRCWALGFYPAEITLTWQRDGEDQTQDTELVETRPCGDGTFQKWAAVVVPSGEEQRYTCHVQHEGLPKPLTLRWE

SEQ ID NO: 150 - protein, 275 aa, Artificial sequence
  synthetic sequence
GSHSMRYFSTSVSRPGRGEPRFIAVGYVDDTQFVRFDSDAASQRMEPRAPWIEQEGPEYWDEETGKVKAHSQTDRENLRIALRCYNQSEAGSHTLQMMFGCDVGSDGRFLRGYHQYAYDGKDYIALKEDLRSWTAADMAAQITKRKWEAAHVAEQQRAYLEGTCVDGLRRYLENGKETLQRTDPPKTHMTHHPISDHEATLRCWALGFYPAEITLTWQRDGEDQTQDTELVETRPCGDGTFQKWAAVVVPSGEEQRYTCHVQHEGLPKPLTLRWE

SEQ ID NO: 151 - protein, 275 aa, Artificial sequence
  synthetic sequence
GSHSMRYFSTSVSRPGRGEPRFIAVGYVDDTQFVRFDSDAASQRMEPRAPWIEQEGPEYWDEETGKVKAQSQTDRENLRIALRCYNQSEAGSHTLQMMFGCDVGSDGRFLRGYHQYAYDGKDYIALKEDLRSWTAADMAAQITKRKWEAAHVAEQQRAYLEGTCVDGLRRYLENGKETLQRTDPPKTHMTHHPISDHEATLRCWALGFYPAEITLTWQRDGEDQTQDTELVETRPCGDGTFQKWAAVVVPSGEEQRYTCHVQHEGLPKPLTLRWE

SEQ ID NO: 152 - protein, 275 aa, Artificial sequence
  synthetic sequence
GSHSMRYFTTSVSRPGRGEPRFIAVGYVDDTQFVRFDSDAASQRMEPRAPWIEQEGPEYWDRNTRNVKAHSQIDRVDLGTLRGCYNQSEAGSHTIQMMYGCDVGSDGRFLRGYQQDAYDGKDYIALNEDLRSWTAADMAAQITQRKWEAARVAEQLRAYLEGTCVEWLRRYLENGKETLQRTDPPKTHMTHHAVSDHEATLRCWALSFYPAEITLTWQRDGEDQTQDTELVETRPCGDGTFQKWASVVVPSGQEQRYTCHVQHEGLPKPLTLRWE

SEQ ID NO: 153 - protein, 275 aa, Artificial sequence
  synthetic sequence
GSHSMRYFYTSVSRPGRGEPRFIAVGYVDDTQFVRFDSDAASQRMEPRAPWIEQEGPEYWDRNTRKVKAQSQTDRVDLGTLRGCYNQSEDGSHTIQRMYGCDVGPDGRFLRGYQQDAYDGKDYIALNEDLRSWTAADMAAQITQRKWETAHEAEQWRAYLEGTCVEWLRRYLENGKETLQRTDAPKTHMTHHAVSDHEATLRCWALSFYPAEITLTWQRDGEDQTQDTELVETRPCGDGTFQKWASVVVPSGQEQRYTCHVQHEGLPKPLTLRWE

SEQ ID NO: 154 - protein, 276 aa, Artificial sequence
  synthetic sequence
GSHSMRYFYTSVSRPGRGEPRFISVGYVDDTQFVRFDSDAASPREEPRAPWIEQEGPEYWDRNTQIYKAQAQTDRESLRNLRGCYNQSEAGSHTLQSMYGCDVGPDGRLLRGHDQYAYDGKDYIALNEDLRSWTAADTAAQITQRKWEAAREAEQRRAYLEGECVEWLRRYLENGKDKLERADPPKTHVTHHPISDHEATLRCWALGFYPAEITLTWQRDGEDQTQDTELVETRPCGDRTFQKWAAVVVPSGEEQRYTCHVQHEGLPKPLTLRWEP

SEQ ID NO: 155 - protein, 99 aa, Artificial sequence; identical to SEQ ID NO: 126
  synthetic sequence

SEQ ID NO: 156 - protein, 275 aa, Artificial sequence
  synthetic sequence
GSHSMRYFYTSVSRPGRGEPRFISVGYVDDTQFVRFDSDAASPREEPRAPWIEQEGPEYWDRNTQIYKAQAQTDRESLRNLRGCYNQSEAGSHTLQSMYGCDVGPDGRLLRGHDQYAYDGKDYIALNEDLRSWTAADTAAQITQRKWEAAREAEQRRAYLEGECVEWLRRYLENGKDKLERADPPKTHVTHHPISDHEATLRCWALGFYPAEITLTWQRDGEDQTQDTELVETRPCGDRTFQKWAAVVVPSGEEQRYTCHVQHEGLPKPLTLRWE

SEQ ID NO: 157 - protein, 275 aa, Artificial sequence
  synthetic sequence
GSHSMRYFDTAMSRPGRGEPRFISVGYVDDTQFVRFDSDAASPREEPRAPWIEQEGPEYWDRNTQIFKTNTQTDRESLRNLRGCYNQSEAGSHTLQSMYGCDVGPDGRLLRGHNQYAYDGKDYIALNEDLRSWTAADTAAQITQRKWEAARVAEQDRAYLEGTCVEWLRRYLENGKDTLERADPPKTHVTHHPISDHEATLRCWALGFYPAEITLTWQRDGEDQTQDTELVETRPCGDRTFQKWAAVVVPSGEEQRYTCHVQHEGLPKPLTLRWE

SEQ ID NO: 158 - protein, 275 aa, Artificial sequence
  synthetic sequence
GSHSMRYFYTAMSRPGRGEPRFIAVGYVDDTQFVRFDSDAASPRMAPRAPWIEQEGPEYWDRNTQISKTNTQTYRESLRNLRGCYNQSEAGSHIIQRMYGCDVGPDGRLLRGYDQSAYDGKDYIALNEDLSSWTAADTAAQITQRKWEAAREAEQLRAYLEGLCVEWLRRYLENGKETLQRADPPKTHVTHHPISDHEATLRCWALGFYPAEITLTWQRDGEDQTQDTELVETRPCGDRTFQKWAAVVVPSGEEQRYTCHVQHEGLPKPLTLRWE

SEQ ID NO: 159 - protein, 275 aa, Artificial sequence
  synthetic sequence
GSHSMRYFYTSVSRPGRGEPRFISVGYVDDTQFVRFDSDAASPREEPRAPWIEQEGPEYWDRNTQICKTNTQTYRENLRTALRCYNQSEAGSHTLQRMYGCDVGPDGRLLRGHNQFAYDGKDYIALNEDLSSWTAADTAAQITQRKWEAARVAEQLRTYLEGTCVEWLRRYLENGKETLQRADPPKTHVTHHPISDHEATLRCWALGFYPAEITLTWQRDGEDQTQDTELVETRPCGDRTFQKWAAVVVPSGEEQRYTCHVQHEGLPKPLTLRWE

SEQ ID NO: 160 - protein, 275 aa, Artificial sequence
  synthetic sequence
GSHSMRYFHTAMSRPGRGEPRFITVGYVDDTLFVRFDSDATSPRKEPRAPWIEQEGPEYWDRETQISKTNTQTYRESLRNLRGCYNQSEAGSHTLQRMYGCDVGPDGRLLRGHNQYAYDGKDYIALNEDLRSWTAADTAAQISQRKLEAARVAEQLRAYLEGECVEWLRRYLENGKDKLERADPPKTHVTHHPISDHEATLRCWALGFYPAEITLTWQRDGEDQTQDTELVETRPCGDRTFQKWAAVVVPSGEEQRYTCHVQHEGLPKPLTLRWE

SEQ ID NO: 161 - protein, 275 aa, Artificial sequence
  synthetic sequence
GSHSMRYFYTAMSRPGRGEPRFIAVGYVDDTQFVRFDSDAASPRMAPRAPWIEQEGPEYWDRETQKYKRQAQTDRVSLRNLRGCYNQSEAGSHTLQRMYGCDVGPDGRLLRGHDQSAYDGKDYIALNEDLSSWTAADTAAQITQRKWEAAREAEQWRAYLEGLCVEWLRRYLENGKETLQRADPPKTHVTHHPISDHEATLRCWALGFYPAEITLTWQRDGEDQTQDTELVETRPCGDRTFQKWAAVVVPSGEEQRYTCHVQHEGLPKPLTLRWE

SEQ ID NO: 162 - protein, 275 aa, Artificial sequence
  synthetic sequence
GSHSMRYFYTAMSRPGRGEPRFIAVGYVDDTQFVRFDSDAASPRTEPRAPWIEQEGPEYWDRNTQIFKTNTQTYRENLRIALRCYNQSEAGSHIIQRMYGCDLGPDGRLLRGHDQSAYDGKDYIALNEDLSSWTAADTAAQITQRKWEAARVAEQLRAYLEGLCVEWLRRYLENGKETLQRADPPKTHVTHHPVSDHEATLRCWALGFYPAEITLTWQRDGEDQTQDTELVETRPCGDRTFQKWAAVVVPSGEEQRYTCHVQHEGLPKPLTLRWE

SEQ ID NO: 163 - protein, 276 aa, Artificial sequence
  synthetic sequence
CSHSMRYFDTAVSRPGRGEPRFISVGYVDDTQFVRFDSDAASPRGEPRAPWVEQEGPEYWDRETQNYKRQAQADRVSLRNLRGCYNQSEDGSHTLQRMYGCDLGPDGRLLRGYDQSAYDGKDYIALNEDLRSWTAADTAAQITQRKLEAARAAEQLRAYLEGTCVEWLRRYLENGKETLQRAEPPKTHVTHHPLSDHEATLRCWALGFYPAEITLTWQRDGEDQTQDTELVETRPCGDGTFQKWAAVVVPSGQEQRYTCHMQHEGLQEPLTLSWEP

SEQ ID NO: 164 - protein, 99 aa, Artificial sequence; identical to SEQ ID NO: 126
  synthetic sequence

SEQ ID NO: 165 - protein, 276 aa, Artificial sequence
  synthetic sequence
CSHSMKYFFTSVSRPGRGEPRFISVGYVDDTQFVRFDSDAASPRGEPRAPWVEQEGPEYWDRETQKYKRQAQTDRVSLRNLRGCYNQSEAGSHTLQWMCGCDLGPDGRLLRGYDQYAYDGKDYIALNEDLRSWTAADTAAQITQRKWEAAREAEQRRAYLEGTCVEWLRRYLENGKETLQRAEHPKTHVTHHPVSDHEATLRCWALGFYPAEITLTWQWDGEDQTQDTELVETRPCGDGTFQKWAAVMVPSGEEQRYTCHVQHEGLPEPLTLRWEP

SEQ ID NO: 166 - protein, 276 aa, Artificial sequence
  synthetic sequence
GSHSMRYFYTAVSRPGRGEPHFIAVGYVDDTQFVRFDSDAASPRGEPRAPWVEQEGPEYWDRETQKYKRQAQTDRVSLRNLRGCYNQSEARSHIIQRMYGCDVGPDGRLLRGYDQYAYDGKDYIALNEDLRSWTAADTAAQITQRKWEAAREAEQLRAYLEGLCVEWLRRYLKNGKETLQRAEHPKTHVTHHPVSDHEATLRCWALGFYPAEITLTWQWDGEDQTQDTELVETRPCGDGTFQKWAAVVVPSGEEQRYTCHVQHEGLPEPLTLRWEP

SEQ ID NO: 167 - protein, 276 aa, Artificial sequence
  synthetic sequence
GSHSMRYFYTAVSRPGRGEPHFIAVGYVDDTQFVRFDSDAASPRGEPRAPWVEQEGPEYWDRETQKYKRQAQTDRVSLRNLRGCYNQSEAGSHIIQRMYGCDVGPDGRLLRGYDQYAYDGKDYIALNEDLRSWTAADTAAQITQRKWEAAREAEQLRAYLEGLCVEWLRRYLKNGKETLQRAEHPKTHVTHHPVSDHEATLRCWALGFYPAEITLTWQWDGEDQTQDTELVETRPCGDGTFQKWAAVVVPSGEEQRYTCHVQHEGLPEPLTLRWEP

SEQ ID NO: 168 - protein, 276 aa, Artificial sequence
  synthetic sequence
GSHSMRYFSTSVSWPGRGEPRFIAVGYVDDTQFVRFDSDAASPRGEPREPWVEQEGPEYWDRETQKYKRQAQADRVNLRKLRGCYNQSEDGSHTLQRMFGCDLGPDGRLLRGYNQFAYDGKDYIALNEDLRSWTAADTAAQITQRKWEAAREAEQRRAYLEGTCVEWLRRYLENGKETLQRAEHPKTHVTHHPVSDHEATLRCWALGFYPAEITLTWQWDGEDQTQDTELVETRPCGDGTFQKWAAVVVPSGEEQRYTCHVQHEGLPEPLTLRWKP

SEQ ID NO: 169 - protein, 276 aa, Artificial sequence
  synthetic sequence
CSHSMRYFDTAVSRPGRGEPRFISVGYVDDTQFVRFDSDAASPRGEPRAPWVEQEGPEYWDRETQKYKRQAQADRVNLRKLRGCYNQSEDGSHTLQWMYGCDLGPDGRLLRGYDQSAYDGKDYIALNEDLRSWTAADTAAQITQRKWEAAREAEQWRAYLEGTCVEWLRRYLENGKETLQRAEHPKTHVTHHPVSDHEATLRCWALGFYPAEITLTWQRDGEDQTQDTELVETRPCGDGTFQKWAAVVVPSGEEQRYTCHVQHEGLPEPLTLRWEP

SEQ ID NO: 170 - protein, 276 aa, Artificial sequence; identical to SEQ ID NO: 163
  synthetic sequence

SEQ ID NO: 171 - protein, 276 aa, Artificial sequence
  synthetic sequence
CSHSMRYFDTAVSRPGRGEPRFISVGYVDDTQFVRFDSDAASPRGEPRAPWVEQEGPEYWDRETQKYKRQAQADRVSLRNLRGCYNQSEDGSHTLQRMSGCDLGPDGRLLRGYDQSAYDGKDYIALNEDLRSWTAADTAAQITQRKLEAARAAEQLRAYLEGTCVEWLRRYLENGKETLQRAEPPKTHVTHHPLSDHEATLRCWALGFYPAEITLTWQRDGEDQTQDTELVETRPCGDGTFQKWAAVVVPSGQEQRYTCHMQHEGLQEPLTLSWEP

SEQ ID NO: 172 - protein, 276 aa, Artificial sequence
  synthetic sequence
CSHSMRYFYTAVSRPGRGEPRFIAVGYVDDTQFVQFDSDAASPRGEPRAPWVEQEGPEYWDRETQKYKRQAQTDRVSLRNLRGCYNQSEAGSHTLQRMYGCDLGPDGRLLRGYNQFAYDGKDYIALNEDLRSWTAADTAAQITQRKWEAARTAEQLRAYLEGTCVEWLRRYLENGKKTLQRAEHPKTHVTHHPVSDHEATLRCWALGFYPAEITLTWQRDGEDQTQDTELVETRPCGDGTFQKWAAVVVPSGEEQRYTCHVQHEGLPEPLTLRWGP

SEQ ID NO: 173 - protein, 276 aa, Artificial sequence
  synthetic sequence
CSHSMRYFYTAVSRPGRGEPHFIAVGYVDDTQFVRFDSDAASPRGEPRAPWVEQEGPEYWDRETQNYKRQAQTDRVNLRKLRGCYNQSEAGSHIIQRMYGCDLGPDGRLLRGHDQLAYDGKDYIALNEDLRSWTAADTAAQITQRKWEAAREAEQLRAYLEGTCVEWLRRYLENGKETLQRAEHPKTHVTHHPVSDHEATLRCWALGFYPAEITLTWQRDGEDQTQDTELVETRPCGDGTFQKWAAVVVPSGEEQRYTCHVQHEGLPEPLTLRWEP

SEQ ID NO: 174 - protein, 5 aa, Artificial sequence
  synthetic sequence
  misc_feature (4)..(4): Xaa can be any naturally occurring amino acid other than proline
VPGXG

SEQ ID NO: 175 - protein, 223 aa, Artificial sequence
  synthetic sequence
PPCPSCPAPEFLGGPSVFLFPPKPKDTLMISRTPEVTCVVVDVSQEDPEVQFNWYVDGVEVHNAKTKPREEQFNSTYRVVSVLTVLHQDWLNGKEYKCKVSNKGLPSSIEKTISKAKGQPREPQVYTLPPSQEEMTKNQVSLTCLVKGFYPSDIAVEWESNGQPENNYKTTPPVLDSDGSFFLYSRLTVDKSRWQEGNVFSCSVMHEALHNHYTQKSLSLSPG

SEQ ID NO: 176 - protein, 586 aa, Artificial sequence
  synthetic sequence
LAGETGQEAAPLDGVLANPPNISSLSPRQLLGFPCAEVSGLSTERVRELAVALAQKNVKLSTEQLRCLAHRLSEPPEDLDALPLDLLLFLNPDAFSGPQACTRFFSRITKANVDLLPRGAPERQRLLPAALACWGVRGSLLSEADVRALGGLACDLPGRFVAESAEVLLPRLVSCPGPLDQDQQEAARAALQGGGPPYGPPSTWSVSTMDALRGLLPVLGQPIIRSIPQGIVAAWRQRSSRDPSWRQPERTILRPRFRREVEKTACPSGKKAREIDESLIFYKKWELEACVDAALLATQMDRVNAIPFTYEQLDVLKHKLDELYPQGYPESVIQHLGYLFLKMSPEDIRKWNVTSLETLKALLEVNKGHEMSPQVATLIDRFVKGRGQLDKDTLDTLTAFYPGYLCSLSPEELSSVPPSSIWAVRPQDLDTCDPRQLDVLYPKARLAFQNMNGSEYFVKIQSFLGGAPTEDLKALSQQNVSMDLATFMKLRTDAVLPLTVAEVQKLLGPHVEGLKAEERHRPVRDWILRQRQDDLDTLGLGLQGGIPNGYLVLDLSMQEALSGTPCLLGPGPVLTVLALLLASTLA

SEQ ID NO: 177 - protein, 10 aa, Artificial sequence
  synthetic sequence
AFYPGYLCSL

SEQ ID NO: 178 - protein, 9 aa, Artificial sequence
  synthetic sequence
VLPLTVAEV

SEQ ID NO: 179 - protein, 9 aa, Artificial sequence
  synthetic sequence
ELAVALAQK

SEQ ID NO: 180 - protein, 9 aa, Artificial sequence
  synthetic sequence
ALQGGGPPY

SEQ ID NO: 181 - protein, 9 aa, Artificial sequence
  synthetic sequence
FYPGYLCSL

SEQ ID NO: 182 - protein, 9 aa, Artificial sequence
  synthetic sequence
LYPKARLAF

SEQ ID NO: 183 - protein, 15 aa, Artificial sequence
  synthetic sequence
LLFLLFSLGWVGPSR

SEQ ID NO: 184 - protein, 15 aa, Artificial sequence
  synthetic sequence
VNKGHEMSPQAPRRP

SEQ ID NO: 185 - protein, 15 aa, Artificial sequence
  synthetic sequence
FMKLRTDAVLPLTVA

SEQ ID NO: 186 - protein, 10 aa, Artificial sequence
  synthetic sequence
DAALLATQMD

SEQ ID NO: 187 - protein, 1055 aa, Artificial sequence
  synthetic sequence
MELAALCRWGLLLALLPPGAASTQVCTGTDMKLRLPASPETHLDMLRHLYQGCQVVQGNLELTYLPTNASLSFLQDIQEVQGYVLIAHNQVRQVPLQRLRIVRGTQLFEDNYALAVLDNGDPLNNTTPVTGASPGGLRELQLRSLTEILKGGVLIQRNPQLCYQDTILWKDIFHKNNQLALTLIDTNRSRACHPCSPMCKGSRCWGESSEDCQSLTRTVCAGGCARCKGPLPTDCCHEQCAAGCTGPKHSDCLACLHFNHSGICELHCPALVTYNTDTFESMPNPEGRYTFGASCVTACPYNYLSTDVGSCTLVCPLHNQEVTAEDGTQRCEKCSKPCARVCYGLGMEHLREVRAVTSANIQEFAGCKKIFGSLAFLPESFDGDPASNTAPLQPEQLQVFETLEEITGYLYISAWPDSLPDLSVFQNLQVIRGRILHNGAYSLTLQGLGISWLGLRSLRELGSGLALIHHNTHLCFVHTVPWDQLFRNPHQALLHTANRPEDECVGEGLACHQLCARGHCWGPGPTQCVNCSQFLRGQECVEECRVLQGLPREYVNARHCLPCHPECQPQNGSVTCFGPEADQCVACAHYKDPPFCVARCPSGVKPDLSYMPIWKFPDEEGACQPCPINCTHSCVDLDDKGCPAEQRASPLTSIISAVVGILLVVVLGVVFGILIKRRQQKIRKYTMRRLLQETELVEPLTPSGAMPNQAQMRILKETELRKVKVLGSGAFGTVYKGIWIPDGENVKIPVAIKVLRENTSPKANKEILDEAYVMAGVGSPYVSRLLGICLTSTVQLVTQLMPYGCLLDHVRENRGRLGSQDLLNWCMQIAKGMSYLEDVRLVHRDLAARNVLVKSPNHVKITDFGLARLLDIDETEYHADGGKVPIKWMALESILRRRFTHQSDVWSYGVTVWELMTFGAKPYDGIPAREIPDLLEKGERLPQPPICTIDVYMIMVKCWMIDSECRPRFRELVSEFSRMARDPQRFVVIQNEDLGPASPLDSTFYRSLLEDDDMGDLVDAEEYLVPQQGFFCPDPAPGAGGMVHHRHRSSSTRNM

SEQ ID NO: 188 - protein, 184 aa, Artificial sequence [sequence omitted]

SEQ ID NO: 189 - protein, 502 aa, Artificial sequence
  synthetic sequence
MDFLLLQDPASTCVPEPASQHTLRSGPGCLQQPEQQGVRDPGGIWAKLGAAEASAERLQGRRSRGASGSEPQQMGSDVRDLNALLPAVPSLGGGGGCALPVSGAAQWAPVLDFAPPGASAYGSLGGPAPPPAPPPPPPPPPHSFIKQEPSWGGAEPHEEQCLSAFTVHFSGQFTGTAGACRYGPFGPPPPSQASSGQARMFPNAPYLPSCLESQPAIRNQGYSTVTFDGTPSYGHTPSHHAAQFPNHSFKHEDPMGQQGSLGEQQYSVPPPVYGCHTPTDSCTGSQALLLRTPYSSDNLYQMTSQLECMTWNQMNLGATLKGHSTGYESDNHTTPILCGAQYRIHTHGVFRGIQDVRRVPGVAPTLVRSASETSEKRPFMCAYPGCNKRYFKLSHLQMHSRKHTGEKPYQCDFKDCERRFSRSDQLKRHQRRHTGVKPFQCKTCQRKFSRSDHLKTHTRTHTGEKPFSCRWPSCQKKFARSDELVRHHNMHQRNMTKLQLAL

SEQ ID NO: 190 - protein, 9 aa, Artificial sequence
  synthetic sequence
RMFPNAPYL

SEQ ID NO: 191 - protein, 8 aa, Artificial sequence
  synthetic sequence
CMTWNQMN

SEQ ID NO: 192 - protein, 9 aa, Artificial sequence
  synthetic sequence
CYTWNQMNL

SEQ ID NO: 193 - protein, 15 aa, Artificial sequence
  synthetic sequence
CMTWNQMNLGATLKG

SEQ ID NO: 194 - protein, 15 aa, Artificial sequence
  synthetic sequence
WNQMNLGATLKGVAA

SEQ ID NO: 195 - protein, 15 aa, Artificial sequence
  synthetic sequence
CMTWNYMNLGATLKG

SEQ ID NO: 196 - protein, 15 aa, Artificial sequence
  synthetic sequence
WNYMNLGATLKGVAA

SEQ ID NO: 197 - protein, 15 aa, Artificial sequence
  synthetic sequence
MTWNQMNLGATLKGV

SEQ ID NO: 198 - protein, 15 aa, Artificial sequence
  synthetic sequence
TWNQMNLGATLKGVA

SEQ ID NO: 199 - protein, 15 aa, Artificial sequence
  synthetic sequence
CMTWNLMNLGATLKG

SEQ ID NO: 200 - protein, 15 aa, Artificial sequence
  synthetic sequence
MTWNLMNLGATLKGV

SEQ ID NO: 201 - protein, 15 aa, Artificial sequence
  synthetic sequence
TWNLMNLGATLKGVA

SEQ ID NO: 202 - protein, 15 aa, Artificial sequence
  synthetic sequence
WNLMNLGATLKGVAA

SEQ ID NO: 203 - protein, 8 aa, Artificial sequence
  synthetic sequence
MNLGATLK

SEQ ID NO: 204 - protein, 15 aa, Artificial sequence
  synthetic sequence
MTWNYMNLGATLKGV

SEQ ID NO: 205 - protein, 15 aa, Artificial sequence
  synthetic sequence
TWNYMNLGATLKGVA

SEQ ID NO: 206 - protein, 17 aa, Artificial sequence
  synthetic sequence
CMTWNQMNLGATLKGVA

SEQ ID NO: 207 - protein, 17 aa, Artificial sequence
  synthetic sequence
CMTWNLMNLGATLKGVA

SEQ ID NO: 208 - protein, 17 aa, Artificial sequence
  synthetic sequence
CMTWNYMNLGATLKGVA

SEQ ID NO: 209 - protein, 9 aa, Artificial sequence
  synthetic sequence
GYLRNPTAC

SEQ ID NO: 210 - protein, 9 aa, Artificial sequence
  synthetic sequence
GALRNPTAL

SEQ ID NO: 211 - protein, 9 aa, Artificial sequence
  synthetic sequence
YALRNPTAC

SEQ ID NO: 212 - protein, 9 aa, Artificial sequence
  synthetic sequence
GLLRNPTAC

SEQ ID NO: 213 - protein, 9 aa, Artificial sequence
  synthetic sequence
RYRPHPGAL

SEQ ID NO: 214 - protein, 9 aa, Artificial sequence
  synthetic sequence
YQRPHPGAL

SEQ ID NO: 215 - protein, 9 aa, Artificial sequence
  synthetic sequence
RLRPHPGAL

SEQ ID NO: 216 - protein, 9 aa, Artificial sequence
  synthetic sequence
RIRPHPGAL

SEQ ID NO: 217 - protein, 15 aa, Artificial sequence
  synthetic sequence
QFPNHSFKHEDPMGQ

SEQ ID NO: 218 - protein, 9 aa, Artificial sequence
  synthetic sequence
HSFKHEDPY

SEQ ID NO: 219 - protein, 13 aa, Artificial sequence
  synthetic sequence
QFPNHSFKHEDPM

SEQ ID NO: 220 - protein, 13 aa, Artificial sequence
  synthetic sequence
QFPNHSFKHEDPY

SEQ ID NO: 221 - protein, 13 aa, Artificial sequence
  synthetic sequence
KRPFMCAYPGCNK

SEQ ID NO: 222 - protein, 13 aa, Artificial sequence
  synthetic sequence
KRPFMCAYPGCYK

SEQ ID NO: 223 - protein, 9 aa, Artificial sequence
  synthetic sequence
FMCAYPGCY

SEQ ID NO: 224 - protein, 9 aa, Artificial sequence
  synthetic sequence
FMCAYPGCK

SEQ ID NO: 225 - protein, 15 aa, Artificial sequence
  synthetic sequence
KRPFMCAYPGCNKRY

SEQ ID NO: 226 - protein, 15 aa, Artificial sequence
  synthetic sequence
SEKRPFMCAYPGCNK

SEQ ID NO: 227 - protein, 15 aa, Artificial sequence
  synthetic sequence
KRPFMCAYPGCYKRY

SEQ ID NO: 228 - protein, 9 aa, Artificial sequence
  synthetic sequence
NLMNLGATL

SEQ ID NO: 229 - protein, 9 aa, Artificial sequence
  synthetic sequence
NYMNLGATL

SEQ ID NO: 230 - protein, 9 aa, Artificial sequence
  synthetic sequence
KLPQLCTEL

SEQ ID NO: 231 - protein, 9 aa, Artificial sequence
  synthetic sequence
LQTTIHDII

SEQ ID NO: 232 - protein, 9 aa, Artificial sequence
  synthetic sequence
VYDFAFRDL

SEQ ID NO: 233 - protein, 9 aa, Artificial sequence
  synthetic sequence
FAFRDLCIV

SEQ ID NO: 234 - protein, 9 aa, Artificial sequence
  synthetic sequence
KFYSKISEY

SEQ ID NO: 235 - protein, 9 aa, Artificial sequence
  synthetic sequence
ISEYRHYCY

SEQ ID NO: 236 - protein, 9 aa, Artificial sequence
  synthetic sequence
TLHEYMLDL

SEQ ID NO: 237 - protein, 9 aa, Artificial sequence
  synthetic sequence
YMLDLQPET

SEQ ID NO: 238 - protein, 9 aa, Artificial sequence
  synthetic sequence
QAEPDRAHY

SEQ ID NO: 239 - protein, 9 aa, Artificial sequence
  synthetic sequence
RAHYNIVTF

SEQ ID NO: 240 - protein, 9 aa, Artificial sequence
  synthetic sequence
CDSTLRLCV

SEQ ID NO: 241 - protein, 10 aa, Artificial sequence
  synthetic sequence
LCVQSTHVDI

SEQ ID NO: 242 - protein, 9 aa, Artificial sequence
  synthetic sequence
LLMGTLGIV

SEQ ID NO: 243 - protein, 8 aa, Artificial sequence
  synthetic sequence
TLGIVCPI

SEQ ID NO: 244 - protein, 12 aa, Artificial sequence
  synthetic sequence
LLMGTLGIVCPI

SEQ ID NO: 245 - protein, 8 aa, Artificial sequence
  synthetic sequence
  misc_feature (1)..(8): Xaa can be any naturally occurring amino acid
XXXXXXXX

SEQ ID NO: 246 - protein, 8 aa, Artificial sequence
  synthetic sequence
  misc_feature (1)..(8): Xaa can be any naturally occurring amino acid
XXXXXXXX

SEQ ID NO: 247 - protein, 8 aa, Artificial sequence
  synthetic sequence
  misc_feature (1)..(8): Xaa can be any naturally occurring amino acid
XXXXXXXX

SEQ ID NO: 248 - protein, 214 aa, Artificial sequence
  synthetic sequence
DIQMTQSPSSLSASVGDRVTITCRASQDVNTAVAWYQQKPGKAPKLLIYSASFLYSGVPSRFSGSRSGTDFTLTISSLQPEDFATYYCQQHYTTPPTFGQGTKVEIKRTVAAPSVFIFPPSDEQLKSGTASVVCLLNNFYPREAKVQWKVDNALQSGNSQESVTEQDSKDSTYSLSSTLTLSKADYEKHKVYACEVTHQGLSSPVTKSFNRGEC

SEQ ID NO: 249 - protein, 450 aa, Artificial sequence
  synthetic sequence
EVQLVESGGGLVQPGGSLRLSCAASGFNIKDTYIHWVRQAPGKGLEWVARIYPTNGYTRYADSVKGRFTISADTSKNTAYLQMNSLRAEDTAVYYCSRWGGDGFYAMDYWGQGTLVTVSSASTKGPSVFPLAPSSKSTSGGTAALGCLVKDYFPEPVTVSWNSGALTSGVHTFPAVLQSSGLYSLSSVVTVPSSSLGTQTYICNVNHKPSNTKVDKKVEPKSCDKTHTCPPCPAPELLGGPSVFLFPPKPKDTLMISRTPEVTCVVVDVSHEDPEVKFNWYVDGVEVHNAKTKPREEQYNSTYRVVSVLTVLHQDWLNGKEYKCKVSNKALPAPIEKTISKAKGQPREPQVYTLPPSREEMTKNQVSLTCLVKGFYPSDIAVEWESNGQPENNYKTTPPVLDSDGSFFLYSKLTVDKSRWQQGNVFSCSVMHEALHNHYTQKSLSLSPGK

SEQ ID NO: 250 - protein, 107 aa, Artificial sequence [sequence omitted]

SEQ ID NO: 251 - protein, 120 aa, Artificial sequence [sequence omitted]

SEQ ID NO: 252 - protein, 120 aa, Artificial sequence [sequence omitted]

SEQ ID NO: 253 - protein, 107 aa, Artificial sequence [sequence omitted]

SEQ ID NO: 254 - protein, 5 aa, Artificial sequence
  synthetic sequence
  MISC_FEATURE (1)..(5): The residues may be repeated 1, 2, 3, 4, 5, 6, 7, 8, 9, or 10 times.
GGGGS

SEQ ID NO: 255 - protein, 11 aa, Artificial sequence
  synthetic sequence
RASQDVNTAVA

SEQ ID NO: 256 - protein, 6 aa, Artificial sequence
  synthetic sequence
SASFLY

SEQ ID NO: 257 - protein, 8 aa, Artificial sequence
  synthetic sequence
QQHYTTPP

SEQ ID NO: 258 - protein, 8 aa, Artificial sequence
  synthetic sequence
GFNIKDTY

SEQ ID NO: 259 - protein, 8 aa, Artificial sequence
  synthetic sequence
IYPTNGYT

SEQ ID NO: 260 - protein, 13 aa, Artificial sequence
  synthetic sequence
SRWGGDGFYAMDY

SEQ ID NO: 261 - protein, 242 aa, Artificial sequence
  synthetic sequence
EVQLVESGGGLVQPGGSLRLSCAASGFNIKDTYIHWVRQAPGKGLEWVARIYPTNGYTRYADSVKGRFTISADTSKNTAYLQMNSLRAEDTAVYYCSRWGGDGFYAMDYWGQGTLVTVSSGGGGSGGGGSGGGGSDIQMTQSPSSLSASVGDRVTITCRASQDVNTAVAWYQQKPGKAPKLLIYSASFLYSGVPSRFSGSRSGTDFTLTISSLQPEDFATYYCQQHYTTPPTFGQGTKVEIK

SEQ ID NO: 262 - protein, 214 aa, Artificial sequence
  synthetic sequence
DIQMTQSPSSLSASVGDRVTITCKASQDVSIGVAWYQQKPGKAPKLLIYSASYRYTGVPSRFSGSGSGTDFTLTISSLQPEDFATYYCQQYYIYPYTFGQGTKVEIKRTVAAPSVFIFPPSDEQLKSGTASVVCLLNNFYPREAKVQWKVDNALQSGNSQESVTEQDSKDSTYSLSSTLTLSKADYEKHKVYACEVTHQGLSSPVTKSFNRGEC

SEQ ID NO: 263 - protein, 448 aa, Artificial sequence
  synthetic sequence
EVQLVESGGGLVQPGGSLRLSCAASGFTFTDYTMDWVRQAPGKGLEWVADVNPNSGGSIYNQRFKGRFTLSVDRSKNTLYLQMNSLRAEDTAVYYCARNLGPSFYFDYWGQGTLVTVSSASTKGPSVFPLAPSSKSTSGGTAALGCLVKDYFPEPVTVSWNSGALTSGVHTFPAVLQSSGLYSLSSVVTVPSSSLGTQTYICNVNHKPSNTKVDKKVEPKSCDKTHTCPPCPAPELLGGPSVFLFPPKPKDTLMISRTPEVTCVVVDVSHEDPEVKFNWYVDGVEVHNAKTKPREEQYNSTYRVVSVLTVLHQDWLNGKEYKCKVSNKALPAPIEKTISKAKGQPREPQVYTLPPSREEMTKNQVSLTCLVKGFYPSDIAVEWESNGQPENNYKTTPPVLDSDGSFFLYSKLTVDKSRWQQGNVFSCSVMHEALHNHYTQKSLSLSPG

SEQ ID NO: 264 - protein, 107 aa, Artificial sequence [sequence omitted]

SEQ ID NO: 265 - protein, 119 aa, Artificial sequence [sequence omitted]

SEQ ID NO: 266 - protein, 11 aa, Artificial sequence
  synthetic sequence
KASQDVSIGVA

SEQ ID NO: 267 - protein, 6 aa, Artificial sequence
  synthetic sequence
SASYRY

SEQ ID NO: 268 - protein, 8 aa, Artificial sequence
  synthetic sequence
QQYYIYPY

SEQ ID NO: 269 - protein, 10 aa, Artificial sequence
  synthetic sequence
GFTFTDYTMD

SEQ ID NO: 270 - protein, 18 aa, Artificial sequence
  synthetic sequence
ADVNPNSGGSIYNQRFKG

SEQ ID NO: 271 - protein, 12 aa, Artificial sequence
  synthetic sequence
ARNLGPSFYFDY

SEQ ID NO: 272 - protein, 242 aa, Artificial sequence; identical to SEQ ID NO: 261
  synthetic sequence

SEQ ID NO: 273 - protein, 15 aa, Artificial sequence
  synthetic sequence
KASQSVDYDGDSYLN

SEQ ID NO: 274 - protein, 7 aa, Artificial sequence
  synthetic sequence
DASNLVS

SEQ ID NO: 275 - protein, 9 aa, Artificial sequence
  synthetic sequence
QQSTEDPWT

SEQ ID NO: 276 - protein, 5 aa, Artificial sequence
  synthetic sequence
SYWMN

SEQ ID NO: 277 - protein, 17 aa, Artificial sequence
  synthetic sequence
QIWPGDGDTNYNGKFKG

SEQ ID NO: 278 - protein, 15 aa, Artificial sequence
  synthetic sequence
RETTTVGRYYYAMDY

SEQ ID NO: 279 - protein, 15 aa, Artificial sequence
  synthetic sequence
KASQSVDYDGDSYLN

SEQ ID NO: 280 - protein, 7 aa, Artificial sequence
  synthetic sequence
DASNLVS

SEQ ID NO: 281 - protein, 9 aa, Artificial sequence
  synthetic sequence
QQSTEDPWT

SEQ ID NO: 282 - protein, 5 aa, Artificial sequence
  synthetic sequence
SYWMN

SEQ ID NO: 283 - protein, 17 aa, Artificial sequence
  synthetic sequence
QIWPGDGDTNYNGKFKG

SEQ ID NO: 284 - protein, 15 aa, Artificial sequence
  synthetic sequence
RETTTVGRYYYAMDY

SEQ ID NO: 285 - protein, 249 aa, Artificial sequence
  synthetic sequence
DIQLTQSPASLAVSLGQRATISCKASQSVDYDGDSYLNWYQQIPGQPPKLLIYDASNLVSGIPPRFSGSGSGTDFTLNIHPVEKVDAATYHCQQSTEDPWTFGGGTKLEIKGGGGSGGGGSGGGGSQVQLQQSGAELVRPGSSVKISCKASGYAFSSYWMNWVKQRPGQGLEWIGQIWPGDGDTNYNGKFKGKATLTADESSSTAYMQLSSLASEDSAVYFCARRETTTVGRYYYAMDYWGQGTTVTVS

SEQ ID NO: 286 - protein, 217 aa, Artificial sequence
  synthetic sequence
DIALTQPASVSGSPGQSITISCTGTSSDIGGYNSVSWYQQHPGKAPKLMIYGVNNRPSGVSNRFSGSKSGNTASLTISGLQAEDEADYYCSSYDIESATPVFGGGTKLTVLGQPKAAPSVTLFPPSSEELQANKATLVCLISDFYPGAVTVAWKGDSSPVKAGVETTTPSKQSNNKYAASSYLSLTPEQWKSHRSYSCQVTHEGSTVEKTVAPTESS

SEQ ID NO: 287 - protein, 450 aa, Artificial sequence
  synthetic sequence
QVELVQSGAEVKKPGESLKISCKGSGYSFTSYWIGWVRQAPGKGLEWMGIIDPGDSRTRYSPSFQGQVTISADKSISTAYLQWSSLKASDTAMYYCARGQLYGGTYMDGWGQGTLVTVSSASTKGPSVFPLAPSSKSTSGGTAALGCLVKDYFPEPVTVSWNSGALTSGVHTFPAVLQSSGLYSLSSVVTVPSSSLGTQTYICNVNHKPSNTKVDKKVEPKSCDKTHTCPPCPAPELLGGPSVFLFPPKPKDTLMISRTPEVTCVVVDVSHEDPEVKFNWYVDGVEVHNAKTKPREEQYNSTYRVVSVLTVLHQDWLNGKEYKCKVSNKALPAPIEKTISKAKGQPREPQVYTLPPSRDELTKNQVSLTCLVKGFYPSDIAVEWESNGQPENNYKTTPPVLDSDGSFFLYSKLTVDKSRWQQGNVFSCSVMHEALHNHYTQKSLSLSPGK

SEQ ID NO: 288 - protein, 107 aa, Artificial sequence
  synthetic sequence
DIALTQPASVSGSPGQSITISCTGTSSDIGGYNSVSWYQQHPGKAPKLMIYGVNNRPSGVSNRFSGSKSGNTASLTISGLQAEDEADYYCSSYDIESATPVFGGGTK

SEQ ID NO: 289 - protein, 120 aa, Artificial sequence
  synthetic sequence
QVELVQSGAEVKKPGESLKISCKGSGYSFTSYWIGWVRQAPGKGLEWMGIIDPGDSRTRYSPSFQGQVTISADKSISTAYLQWSSLKASDTAMYYCARGQLYGGTYMDGWGQGTLVTVSS

SEQ ID NO: 290 - protein, 14 aa, Artificial sequence
  synthetic sequence
TGTSSDIGGYNSVS

SEQ ID NO: 291 - protein, 11 aa, Artificial sequence
  synthetic sequence
LMIYGVNNRPS

SEQ ID NO: 292 - protein, 10 aa, Artificial sequence
  synthetic sequence
SSYDIESATP

SEQ ID NO: 293 - protein, 10 aa, Artificial sequence
  synthetic sequence
GYSFTSYWIG

SEQ ID NO: 294 - protein, 16 aa, Artificial sequence
  synthetic sequence
WMGIIDPGDSRTRYSP

SEQ ID NO: 295 - protein, 11 aa, Artificial sequence
  synthetic sequence
GQLYGGTYMDG

SEQ ID NO: 296 - protein, 244 aa, Artificial sequence
  synthetic sequence
QVQLQQSGAEVKKPGASVKVSCKASGYTFTGYYMHWVRQAPGQGLEWMGRINPNSGGTNYAQKFQGRVTMTRDTSISTAYMELSRLRSEDTAVYYCARGRYYGMDVWGQGTMVTVSSGGGGSGGGGSGGGGSGGGGSEIVLTQSPATLSLSPGERATISCRASQSVSSNFAWYQQRPGQAPRLLIYDASNRATGIPPRFSGSGSGTDFTLTISSLEPEDFAAYYCHQRSNWLYTFGQGTKVDIK

SEQ ID NO: 297 - protein, 253 aa, Artificial sequence
  synthetic sequence
QVQLVQSGAEVKKPGASVKVSCKASGYTFTGYYMHWVRQAPGQGLEWMGWINPNSGGTNYAQKFQGRVTMTRDTSISTAYMELSRLRSDDTAVYYCARDLRRTVVTPRAYYGMDVWGQGTTVTVSSGGGGSGGGGSGGGGSGGGGSDIQLTQSPSTLSASVGDRVTITCQASQDISNSLNWYQQKAGKAPKLLIYDASTLETGVPSRFSGSGSGTDFSFTISSLQPEDIATYYCQQHDNLPLTFGQGTKVEIK

SEQ ID NO: 298 - protein, 217 aa, Artificial sequence
  synthetic sequence
QSVLTQPPSASGTPGQRVTISCSGSSSNIGSNTVNWYQQLPGTAPKLLIFNYHQRPSGVPDRFSGSKSGSSASLAISGLQSEDEADYYCAAWDDSLNGWVFGGGTKLTVLGQPKAAPSVTLFPPSSEELQANKATLVCLISDFYPGAVTVAWKADSSPVKAGVETTTPDSKQSNNKYAASSYLSLTPEQWKSHRSYSCQVTHEGSTVEKTVAPTECS

SEQ ID NO: 299 - protein, 453 aa, Artificial sequence
  synthetic sequence
EVQLVESGGGLVKPGGSLRLSCAASGFTFGDYALSWFRQAPGKGLEWVGVSRSKAYGGTTDYAASVKGRFTISRDDSKSTAYLQMNSLKTEDTAVYYCASSGYSSGWTPFDYWGQGTLVTVSSASTKGPSVFPLAPSSKSTSGGTAALGCLVKDYFPEPVTVSWNSGALTSGVHTFPAVLQSSGLYSLSSVVTVPSSSLGTQTYICNVNHKPSNTKVDKKVEPKSCDKTHTCPPCPAPELLGGPSVFLFPPKPKDTLMISRTPEVTCVVVDVSHEDPEVKFNWYVDGVEVHNAKTKPREEQYNSTYRVVSVLTVLHQDWLNGKEYKCKVSNKALPAPIEKTISKAKGQPREPQVYTLPPSREEMTKNQVSLTCLVKGFYPSDIAVEWESNGQPENNYKTTPPVLDSDGSFFLYSKLTVDKSRWQQGNVFSCSVMHEALHNHYTQKSLSLSPGK

SEQ ID NO: 300 - protein, 111 aa, Artificial sequence
  synthetic sequence
QSVLTQPPSASGTPGQRVTISCSGSSSNIGSNTVNWYQQLPGTAPKLLIFNYHQRPSGVPDRFSGSKSGSSASLAISGLQSEDEADYYCAAWDDSLNGWVFGGGTKLTVLG

SEQ ID NO: 301 - protein, 131 aa, Artificial sequence
  synthetic sequence
EVQLVESGGGLVKPGGSLRLSCAASGFTFGDYALSWFRQAPGKGLEWVGVSRSKAYGGTTDYAASVKGRFTISRDDSKSTAYLQMNSLKTEDTAVYYCASSGYSSGWTPFDYWGQGTLVTVSSASTKGPSV

SEQ ID NO: 302 - protein, 8 aa, Artificial sequence
  synthetic sequence
SSNIGSNT

SEQ ID NO: 303 - protein, 11 aa, Artificial sequence
  synthetic sequence
AAWDDSLNGWV

SEQ ID NO: 304 - protein, 8 aa, Artificial sequence
  synthetic sequence
GFTFGDYA

SEQ ID NO: 305 - protein, 10 aa, Artificial sequence
  synthetic sequence
SRSKAYGGTT

SEQ ID NO: 306 - protein, 14 aa, Artificial sequence
  synthetic sequence
ASSGYSSGWTPFDY

SEQ ID NO: 307 - protein, 249 aa, Artificial sequence
  synthetic sequence
QVQLVQSGAEVKKPGSSVKVSCKASGGTFSNYWMHWVRQAPGQGLEWMGATYRGHSDTYYNQKFKGRVTITADKSTSTAYMELSSLRSEDTAVYYCARGAIYNGYDVLDNWGQGTLVTVSSGGGGSGGGGSGGGGSGGGGSDIQMTQSPSSLSASVGDRVTITCSASQDISNYLNWYQQKPGKAPKLLIYYTSNLHSGVPSRFSGSGSGTDFTLTISSLQPEDFATYYCQQYRKLPWTFGQGTKLEIKR

SEQ ID NO: 308 - protein, 249 aa, Artificial sequence
  synthetic sequence
DIQMTQSPSSLSASVGDRVTITCSASQDISNYLNWYQQKPGKAPKLLIYYTSNLHSGVPSRFSGSGSGTDFTLTISSLQPEDFATYYCQQYRKLPWTFGQGTKLEIKRGGGGSGGGGSGGGGSGGGGSQVQLVQSGAEVKKPGSSVKVSCKASGGTFSNYWMHWVRQAPGQGLEWMGATYRGHSDTYYNQKFKGRVTITADKSTSTAYMELSSLRSEDTAVYYCARGAIYNGYDVLDNWGQGTLVTVSS

SEQ ID NO: 309 - protein, 8 aa, Artificial sequence
  synthetic sequence
  misc_feature (1)..(8): Xaa can be any naturally occurring amino acid
XXXXXXXX

SEQ ID NO: 310 - protein, 8 aa, Artificial sequence
  synthetic sequence
  misc_feature (1)..(8): Xaa can be any naturally occurring amino acid
XXXXXXXX

SEQ ID NO: 311 - protein, 8 aa, Artificial sequence
  synthetic sequence
  misc_feature (1)..(8): Xaa can be any naturally occurring amino acid
XXXXXXXX

SEQ ID NO: 312 - protein, 8 aa, Artificial sequence
  synthetic sequence
  misc_feature (1)..(8): Xaa can be any naturally occurring amino acid
XXXXXXXX

SEQ ID NO: 313 - protein, 8 aa, Artificial sequence
  synthetic sequence
  misc_feature (1)..(8): Xaa can be any naturally occurring amino acid
XXXXXXXX

SEQ ID NO: 314 - protein, 8 aa, Artificial sequence
  synthetic sequence
  misc_feature (1)..(8): Xaa can be any naturally occurring amino acid
XXXXXXXX

SEQ ID NO: 315 - protein, 8 aa, Artificial sequence
  synthetic sequence
  misc_feature (1)..(8): Xaa can be any naturally occurring amino acid
XXXXXXXX

SEQ ID NO: 316 - protein, 8 aa, Artificial sequence
  synthetic sequence
  misc_feature (1)..(8): Xaa can be any naturally occurring amino acid
XXXXXXXX

SEQ ID NO: 317 - protein, 8 aa, Artificial sequence
  synthetic sequence
  misc_feature (1)..(8): Xaa can be any naturally occurring amino acid
XXXXXXXX

SEQ ID NO: 318 - protein, 8 aa, Artificial sequence
  synthetic sequence
  misc_feature (1)..(8): Xaa can be any naturally occurring amino acid
XXXXXXXX

SEQ ID NO: 319 - protein, 20 aa, Artificial sequence
  synthetic sequence
VTSAPDTRPAPGSTAPPAHG

SEQ ID NO: 320 - protein, 43 aa, Artificial sequence
  synthetic sequence
SNIKFRPGSVVVQLTLAFREGTINVHDVETQFNQYKTEAASRY

SEQ ID NO: 321 - protein, 35 aa, Artificial sequence
  synthetic sequence
SVVVQLTLAFREGTINVHDVETQFNQYKTEAASRY

SEQ ID NO: 322 - protein, 20 aa, Artificial sequence
  synthetic sequence
LAFREGTINVHDVETQFNQY

SEQ ID NO: 323 - protein, 25 aa, Artificial sequence
  synthetic sequence
SNIKFRPGSVVVQLTLAAFREGTIN

SEQ ID NO: 324 - protein, 5 aa, Artificial sequence
  synthetic sequence
RYGMS

SEQ ID NO: 325 - protein, 17 aa, Artificial sequence
  synthetic sequence
TISGGGTYIYYPDSVKG

SEQ ID NO: 326 - protein, 13 aa, Artificial sequence
  synthetic sequence
DNYGRNYDYGMDY

SEQ ID NO: 327 - protein, 10 aa, Artificial sequence
  synthetic sequence
SATSSVSYIH

SEQ ID NO: 328 - protein, 7 aa, Artificial sequence
  synthetic sequence
STSNLAS

SEQ ID NO: 329 - protein, 9 aa, Artificial sequence
  synthetic sequence
QQRSSSPFT

SEQ ID NO: 330 - protein, 5 aa, Artificial sequence
  synthetic sequence
GYAMS

SEQ ID NO: 331 - protein, 17 aa, Artificial sequence
  synthetic sequence
TISSGGTYIYYPDSVKG

SEQ ID NO: 332 - protein, 12 aa, Artificial sequence
  synthetic sequence
LGGDNYYEYFDV

SEQ ID NO: 333 - protein, 15 aa, Artificial sequence
  synthetic sequence
RASKSVSTSGYSYMH

SEQ ID NO: 334 - protein, 7 aa, Artificial sequence
  synthetic sequence
LASNLES

SEQ ID NO: 335 - protein, 9 aa, Artificial sequence
  synthetic sequence
QHSRELPFT

SEQ ID NO: 336 - protein, 5 aa, Artificial sequence
  synthetic sequence
DYAMN

SEQ ID NO: 337 - protein, 17 aa, Artificial sequence
  synthetic sequence
VISTFSGNINFNQKFKG

SEQ ID NO: 338 - protein, 10 aa, Artificial sequence
  synthetic sequence
SDYYGPYFDY

SEQ ID NO: 339 - protein, 16 aa, Artificial sequence
  synthetic sequence
RSSQTIVHSNGNTYLE

SEQ ID NO: 340 - protein, 7 aa, Artificial sequence
  synthetic sequence
KVSNRFS

SEQ ID NO: 341 - protein, 9 aa, Artificial sequence
  synthetic sequence
FQGSHVPFT

SEQ ID NO: 342 - protein, 5 aa, Artificial sequence
  synthetic sequence
GYAMS

SEQ ID NO: 343 - protein, 17 aa, Artificial sequence
  synthetic sequence
TISSGGTYIYYPDSVKG

SEQ ID NO: 344 - protein, 9 aa, Artificial sequence
  synthetic sequence
LGGDNYYEY

SEQ ID NO: 345 - protein, 15 aa, Artificial sequence
  synthetic sequence
TASKSVSTSGYSYMH

SEQ ID NO: 346 - protein, 7 aa, Artificial sequence
  synthetic sequence
LVSNLES

SEQ ID NO: 347 - protein, 10 aa, Artificial sequence
  synthetic sequence
QHIRELTRSE

SEQ ID NO: 348 - protein, 8 aa, Artificial sequence
  synthetic sequence
  misc_feature (1)..(8): Xaa can be any naturally occurring amino acid
XXXXXXXX

SEQ ID NO: 349 - protein, 8 aa, Artificial sequence
  synthetic sequence
  misc_feature (1)..(8): Xaa can be any naturally occurring amino acid
XXXXXXXX

SEQ ID NO: 350 - protein, 8 aa, Artificial sequence
  synthetic sequence
  misc_feature (1)..(8): Xaa can be any naturally occurring amino acid
XXXXXXXX

SEQ ID NO: 351 - protein, 8 aa, Artificial sequence
  synthetic sequence
  misc_feature (1)..(8): Xaa can be any naturally occurring amino acid
XXXXXXXX

SEQ ID NO: 352 - protein, 8 aa, Artificial sequence
  synthetic sequence
  misc_feature (1)..(8): Xaa can be any naturally occurring amino acid
XXXXXXXX

SEQ ID NO: 353 - protein, 115 aa, Artificial sequence
  synthetic sequence
MQEVTQIPAALSVPEGENLVLNCSFTDSAIYNLQWFRQDPGKGLTSLLLIQSSQREQTSGRLNASLDKSSGRSTLYIAASQPGDSATYLCAVRPTSGGSYIPTFGRGTSLIVHPY

SEQ ID NO: 354 - protein, 112 aa, Artificial sequence
  synthetic sequence
MGVTQTPKFQVLKTGQSMTLQCAQDMNHEYMSWYRQDPGMGLRLIHYSVGAGITDQGEVPNGYNVSRSTTEDFPLRLLSAAPSQTSVYFCASSYVGNTGELFFGEGSRLTVL

SEQ ID NO: 355 - protein, 115 aa, Artificial sequence
  synthetic sequence
MQEVTQIPAALSVPEGENLVLNCSFTDSAIYNLQWFRQDPGKGLTSLLLIMSHQREQTSGRLNASLDKSSGRSTLYIAASQPGDSATYLCAVRPTSGGSYIPTFGRGTSLIVHPY

SEQ ID NO: 356 - protein, 112 aa, Artificial sequence
  synthetic sequence
MGVTQTPKFQVLKTGQSMTLQCAQDMNHEYMSWYRQDPGMGLRLIHYSVSAGITDQGEVPNGYNVSRSTTEDFPLRLLSAAPSQTSVYFCASSYVGNTGELFFGEGSRLTVL

SEQ ID NO: 357 - protein, 9 aa, Artificial sequence
  synthetic sequence
YIIFVYIPL

SEQ ID NO: 358 - protein, 9 aa, Artificial sequence
  synthetic sequence
KLPQLCTEL

SEQ ID NO: 359 - protein, 10 aa, Artificial sequence
  synthetic sequence
TIHEIILECV

SEQ ID NO: 360 - protein, 9 aa, Artificial sequence
  synthetic sequence
YMLDLQPET

SEQ ID NO: 361 - protein, 8 aa, Artificial sequence
  synthetic sequence
TLGIVCPI

SEQ ID NO: 362 - protein, 9 aa, Artificial sequence
  synthetic sequence
KCIDFYSRI

SEQ ID NO: 363 - protein, 9 aa, Artificial sequence
  synthetic sequence
FQQLFLNTL

SEQ ID NO: 364 - protein, 132 aa, Artificial sequence
  synthetic sequence
METLLGLLILQLQLQWVSSKQEVTQIPAALSVPEGENLVLNCSFTDSAIYNLQWFRQDPGKGLTSLLLIQSSQREQTSGRLNASLDKSSGRSTLYIAASQPGDSATYLCAVRETSGSRLTFGEGTQLTVNPD

SEQ ID NO: 365 - protein, 133 aa, Artificial sequence
  synthetic sequence
MGIRLLCRVAFCFLAVGLVDVKVTQSSRYLVKRTGEKVFLECVQDMDHENMFWYRQDPGLGLRLIYFSYDVKMKEKGDIPEGYSVSREKKERFSLILESASTNQTSMYLCASSFWGRSTDTQYFGPGTRLTVL

SEQ ID NO: 366 - protein, 5 aa, Artificial sequence
  synthetic sequence
  MISC_FEATURE (1)..(5): The residues may be repeated
GSGGS

SEQ ID NO: 367 - protein, 4 aa, Artificial sequence
  synthetic sequence
  MISC_FEATURE (1)..(4): The residues may be repeated
GGGS

SEQ ID NO: 368 - protein, 4 aa, Artificial sequence
  synthetic sequence
GGSG

SEQ ID NO: 369 - protein, 5 aa, Artificial sequence
  synthetic sequence
GGSGG

SEQ ID NO: 370 - protein, 5 aa, Artificial sequence
  synthetic sequence
GSGSG

SEQ ID NO: 371 - protein, 5 aa, Artificial sequence
  synthetic sequence
GSGGG

SEQ ID NO: 372 - protein, 5 aa, Artificial sequence
  synthetic sequence
GGGSG

SEQ ID NO: 373 - protein, 5 aa, Artificial sequence
  synthetic sequence
GSSSG

SEQ ID NO: 374 - protein, 5 aa, Artificial sequence
  synthetic sequence
  MISC_FEATURE (2)..(5): The residues may be repeated 1, 2, 3, 4, 5, 6, 7, 8, 9, or 10 times.
GSSSS

SEQ ID NO: 375 - protein, 20 aa, Artificial sequence
  synthetic sequence
GSSSSGSSSSGSSSSGSSSS

SEQ ID NO: 376 - protein, 25 aa, Artificial sequence
  synthetic sequence
GSSSSGSSSSGSSSSGSSSSGSSSS

SEQ ID NO: 377 - protein, 5 aa, Artificial sequence
  synthetic sequence
GGGGS

SEQ ID NO: 378 - protein, 10 aa, Artificial sequence
  synthetic sequence
GGGGSGGGGS

SEQ ID NO: 379 - protein, 15 aa, Artificial sequence
  synthetic sequence
GGGGSGGGGSGGGGS

SEQ ID NO: 380 - protein, 20 aa, Artificial sequence
  synthetic sequence
GGGGSGGGGSGGGGSGGGGS

SEQ ID NO: 381 - protein, 25 aa, Artificial sequence
  synthetic sequence
GGGGSGGGGSGGGGSGGGGSGGGGS

SEQ ID NO: 382 - protein, 30 aa, Artificial sequence
  synthetic sequence
GGGGSGGGGSGGGGSGGGGSGGGGSGGGGS

SEQ ID NO: 383 - protein, 35 aa, Artificial sequence
  synthetic sequence
GGGGSGGGGSGGGGSGGGGSGGGGSGGGGSGGGGS

SEQ ID NO: 384 - protein, 40 aa, Artificial sequence
  synthetic sequence
GGGGSGGGGSGGGGSGGGGSGGGGSGGGGSGGGGSGGGGS

SEQ ID NO: 385 - protein, 45 aa, Artificial sequence
  synthetic sequence
GGGGSGGGGSGGGGSGGGGSGGGGSGGGGSGGGGSGGGGSGGGGS

SEQ ID NO: 386 - protein, 50 aa, Artificial sequence
  synthetic sequence
GGGGSGGGGSGGGGSGGGGSGGGGSGGGGSGGGGSGGGGSGGGGSGGGGS

SEQ ID NO: 387 - protein, 5 aa, Artificial sequence
  synthetic sequence
AAAGG

SEQ ID NO: 388 - protein, 15 aa, Artificial sequence
  synthetic sequence
GCGGSGGGGSGGGGS

SEQ ID NO: 389 - protein, 10 aa, Artificial sequence
  synthetic sequence
  MISC_FEATURE (6)..(10): The residues may be repeated 1, 2, 3, 4, 5, 6, 7, 8, or 9 times.
GCGGSGGGGS

SEQ ID NO: 390 - protein, 20 aa, Artificial sequence
  synthetic sequence
GCGGSGGGGSGGGGSGGGGS

SEQ ID NO: 391 - protein, 15 aa, Artificial sequence
  synthetic sequence
GCGGSGGGGSGGGGS

SEQ ID NO: 392 - protein, 8 aa, Artificial sequence
  synthetic sequence
  misc_feature (1)..(8): Xaa can be any naturally occurring amino acid
XXXXXXXX

SEQ ID NO: 393 - protein, 8 aa, Artificial sequence
  synthetic sequence
  misc_feature (1)..(8): Xaa can be any naturally occurring amino acid
XXXXXXXX

SEQ ID NO: 394 - protein, 8 aa, Artificial sequence
  synthetic sequence
  misc_feature (1)..(8): Xaa can be any naturally occurring amino acid
XXXXXXXX

SEQ ID NO: 395 - protein, 8 aa, Artificial sequence
  synthetic sequence
  misc_feature (1)..(8): Xaa can be any naturally occurring amino acid
XXXXXXXX

SEQ ID NO: 396 - protein, 9 aa, Artificial sequence
  synthetic sequence
GILGFVFTL

SEQ ID NO: 397 - protein, 9 aa, Artificial sequence
  synthetic sequence
HPVGEADYF

SEQ ID NO: 398 - protein, 219 aa, Artificial sequence
  synthetic sequence
  MISC_FEATURE (8)..(8): Xaa is any aminoa cid other than Asp.
FTVTVPKXLYVVEYGSNMTIECKFPVEKQLDLAALIVYWEMEDKNIIQFVHGEEDLKVQHSSYRQRARLLKDQLSLGNAALQITDVKLQDAGVYRCMISYGGADYKRITVKVNAPYNKINQRILVVDPVTSEHELTCQAEGYPKAEVIWTSSDHQVLSGKTTTTNSKREEKLFNVTSTLRINTTTNEIFYCTFRRLDPEENHTAELVIPGNILNVSIKI

SEQ ID NO: 399 - protein, 219 aa, Artificial sequence
  synthetic sequence
  MISC_FEATURE (36)..(36): Xaa is any amino acid other than Ile
FTVTVPKDLYVVEYGSNMTIECKFPVEKQLDLAALXVYWEMEDKNIIQFVHGEEDLKVQHSSYRQRARLLKDQLSLGNAALQITDVKLQDAGVYRCMISYGGADYKRITVKVNAPYNKINQRILVVDPVTSEHELTCQAEGYPKAEVIWTSSDHQVLSGKTTTTNSKREEKLFNVTSTLRINTTTNEIFYCTFRRLDPEENHTAELVIPGNILNVSIKI

SEQ ID NO: 400 - protein, 219 aa, Artificial sequence
  synthetic sequence
  misc_feature (54)..(54): Xaa can be any amino acid other than glutamine
FTVTVPKDLYVVEYGSNMTIECKFPVEKQLDLAALIVYWEMEDKNIIQFVHGEXDLKVQHSSYRQRARLLKDQLSLGNAALQITDVKLQDAGVYRCMISYGGADYKRITVKVNAPYNKINQRILVVDPVTSEHELTCQAEGYPKAEVIWTSSDHQVLSGKTTTTNSKREEKLFNVTSTLRINTTTNEIFYCTFRRLDPEENHTAELVIPGNILNVSIKI

SEQ ID NO: 401 - protein, 208 aa, Artificial sequence
  synthetic sequence
  misc_feature (19)..(19): Xaa can be any amino acid other than asparagine
VIHVTKEVKEVATLSCGHXVSVEELAQTRIYWQKEKKMVLTMMSGDMNIWPEYKNRTIFDITNNLSIVILALRPSDEGTYECVVLKYEKDAFKREHLAEVTLSVKADFPTPSISDFEIPTSNIRRIICSTSGGFPEPHLSWLENGEELNAINTTVSQDPETELYAVSSKLDFNMTTNHSFMCLIKYGHLRVNQTFNWNTTKQEHFPDN

SEQ ID NO: 402 - protein, 208 aa, Artificial sequence
  synthetic sequence
  misc_feature (63)..(63): Xaa can be any amino acid other than asparagine
VIHVTKEVKEVATLSCGHNVSVEELAQTRIYWQKEKKMVLTMMSGDMNIWPEYKNRTIFDITXNLSIVILALRPSDEGTYECVVLKYEKDAFKREHLAEVTLSVKADFPTPSISDFEIPTSNIRRIICSTSGGFPEPHLSWLENGEELNAINTTVSQDPETELYAVSSKLDFNMTTNHSFMCLIKYGHLRVNQTFNWNTTKQEHFPDN

SEQ ID NO: 403 - protein, 208 aa, Artificial sequence
  synthetic sequence
  misc_feature (67)..(67): Xaa can be any amino acid other than isoleucine
VIHVTKEVKEVATLSCGHNVSVEELAQTRIYWQKEKKMVLTMMSGDMNIWPEYKNRTIFDITNNLSXVILALRPSDEGTYECVVLKYEKDAFKREHLAEVTLSVKADFPTPSISDFEIPTSNIRRIICSTSGGFPEPHLSWLENGEELNAINTTVSQDPETELYAVSSKLDFNMTTNHSFMCLIKYGHLRVNQTFNWNTTKQEHFPDN

SEQ ID NO: 404 - protein, 208 aa, Artificial sequence
  synthetic sequence
  misc_feature (86)..(86): any amino acid other than lysine
VIHVTKEVKEVATLSCGHNVSVEELAQTRIYWQKEKKMVLTMMSGDMNIWPEYKNRTIFDITNNLSIVILALRPSDEGTYECVVLXYEKDAFKREHLAEVTLSVKADFPTPSISDFEIPTSNIRRIICSTSGGFPEPHLSWLENGEELNAINTTVSQDPETELYAVSSKLDFNMTTNHSFMCLIKYGHLRVNQTFNWNTTKQEHFPDN

SEQ ID NO: 405 - protein, 208 aa, Artificial sequence
  synthetic sequence
  misc_feature (157)..(157): any amino acid other than glutamine
VIHVTKEVKEVATLSCGHNVSVEELAQTRIYWQKEKKMVLTMMSGDMNIWPEYKNRTIFDITNNLSIVILALRPSDEGTYECVVLKYEKDAFKREHLAEVTLSVKADFPTPSISDFEIPTSNIRRIICSTSGGFPEPHLSWLENGEELNAINTTVSXDPETELYAVSSKLDFNMTTNHSFMCLIKYGHLRVNQTFNWNTTKQEHFPDN

SEQ ID NO: 406 - protein, 208 aa, Artificial sequence
  synthetic sequence
  misc_feature (158)..(158): any amino acid other than aspartic acid
VIHVTKEVKEVATLSCGHNVSVEELAQTRIYWQKEKKMVLTMMSGDMNIWPEYKNRTIFDITNNLSIVILALRPSDEGTYECVVLKYEKDAFKREHLAEVTLSVKADFPTPSISDFEIPTSNIRRIICSTSGGFPEPHLSWLENGEELNAINTTVSQXPETELYAVSSKLDFNMTTNHSFMCLIKYGHLRVNQTFNWNTTKQEHFPDN

SEQ ID NO: 407 - protein, 208 aa, Artificial sequence
  synthetic sequence
  misc_feature (25)..(25): Xaa can be any amino acid other than leucine
VIHVTKEVKEVATLSCGHNVSVEEXAQTRIYWQKEKKMVLTMMSGDMNIWPEYKNRTIFDITNNLSIVILALRPSDEGTYECVVLKYEKDAFKREHLAEVTLSVKADFPTPSISDFEIPTSNIRRIICSTSGGFPEPHLSWLENGEELNAINTTVSQDPETELYAVSSKLDFNMTTNHSFMCLIKYGHLRVNQTFNWNTTKQEHFPDN

SEQ ID NO: 408 - protein, 208 aa, Artificial sequence
  synthetic sequence
  misc_feature (31)..(31): Xaa can be any amino acid other than tyrosine
VIHVTKEVKEVATLSCGHNVSVEELAQTRIXWQKEKKMVLTMMSGDMNIWPEYKNRTIFDITNNLSIVILALRPSDEGTYECVVLKYEKDAFKREHLAEVTLSVKADFPTPSISDFEIPTSNIRRIICSTSGGFPEPHLSWLENGEELNAINTTVSQDPETELYAVSSKLDFNMTTNHSFMCLIKYGHLRVNQTFNWNTTKQEHFPDN

SEQ ID NO: 409 - protein, 208 aa, Artificial sequence
  synthetic sequence
  misc_feature (33)..(33): Xaa can be any amino acid other than glutamine
VIHVTKEVKEVATLSCGHNVSVEELAQTRIYWXKEKKMVLTMMSGDMNIWPEYKNRTIFDITNNLSIVILALRPSDEGTYECVVLKYEKDAFKREHLAEVTLSVKADFPTPSISDFEIPTSNIRRIICSTSGGFPEPHLSWLENGEELNAINTTVSQDPETELYAVSSKLDFNMTTNHSFMCLIKYGHLRVNQTFNWNTTKQEHFPDN

SEQ ID NO: 410 - protein, 208 aa, Artificial sequence
  synthetic sequence
  misc_feature (38)..(38): Xaa can be any amino acid other than methionine
VIHVTKEVKEVATLSCGHNVSVEELAQTRIYWQKEKKXVLTMMSGDMNIWPEYKNRTIFDITNNLSIVILALRPSDEGTYECVVLKYEKDAFKREHLAEVTLSVKADFPTPSISDFEIPTSNIRRIICSTSGGFPEPHLSWLENGEELNAINTTVSQDPETELYAVSSKLDFNMTTNHSFMCLIKYGHLRVNQTFNWNTTKQEHFPDN

SEQ ID NO: 411 - protein, 208 aa, Artificial sequence
  synthetic sequence
  misc_feature (39)..(39): Xaa can be any amino acid other than valine
VIHVTKEVKEVATLSCGHNVSVEELAQTRIYWQKEKKMXLTMMSGDMNIWPEYKNRTIFDITNNLSIVILALRPSDEGTYECVVLKYEKDAFKREHLAEVTLSVKADFPTPSISDFEIPTSNIRRIICSTSGGFPEPHLSWLENGEELNAINTTVSQDPETELYAVSSKLDFNMTTNHSFMCLIKYGHLRVNQTFNWNTTKQEHFPDN

SEQ ID NO: 412 - protein, 208 aa, Artificial sequence
  synthetic sequence
  misc_feature (49)..(49): Xaa can be any amino acid other than isoleucine
VIHVTKEVKEVATLSCGHNVSVEELAQTRIYWQKEKKMVLTMMSGDMNXWPEYKNRTIFDITNNLSIVILALRPSDEGTYECVVLKYEKDAFKREHLAEVTLSVKADFPTPSISDFEIPTSNIRRIICSTSGGFPEPHLSWLENGEELNAINTTVSQDPETELYAVSSKLDFNMTTNHSFMCLIKYGHLRVNQTFNWNTTKQEHFPDN

SEQ ID NO: 413 - protein, 208 aa, Artificial sequence
  synthetic sequence
  misc_feature (53)..(53): Xaa can be any amino acid other than aspartic acid
VIHVTKEVKEVATLSCGHNVSVEELAQTRIYWQKEKKMVLTMMSGDMNIWPEXKNRTIFDITNNLSIVILALRPSDEGTYECVVLKYEKDAFKREHLAEVTLSVKADFPTPSISDFEIPTSNIRRIICSTSGGFPEPHLSWLENGEELNAINTTVSQDPETELYAVSSKLDFNMTTNHSFMCLIKYGHLRVNQTFNWNTTKQEHFPDN

SEQ ID NO: 414 - protein, 208 aa, Artificial sequence
  synthetic sequence
  misc_feature (60)..(60): any amino acid other than aspartic acid
VIHVTKEVKEVATLSCGHNVSVEELAQTRIYWQKEKKMVLTMMSGDMNIWPEYKNRTIFXITNNLSIVILALRPSDEGTYECVVLKYEKDAFKREHLAEVTLSVKADFPTPSISDFEIPTSNIRRIICSTSGGFPEPHLSWLENGEELNAINTTVSQDPETELYAVSSKLDFNMTTNHSFMCLIKYGHLRVNQTFNWNTTKQEHFPDN

SEQ ID NO: 415 - protein, 208 aa, Artificial sequence
  synthetic sequence
  misc_feature (108)..(108): Xaa can be any amino acid other than phenylalanine
VIHVTKEVKEVATLSCGHNVSVEELAQTRIYWQKEKKMVLTMMSGDMNIWPEYKNRTIFDITNNLSIVILALRPSDEGTYECVVLKYEKDAFKREHLAEVTLSVKADXPTPSISDFEIPTSNIRRIICSTSGGFPEPHLSWLENGEELNAINTTVSQDPETELYAVSSKLDFNMTTNHSFMCLIKYGHLRVNQTFNWNTTKQEHFPDN

SEQ ID NO: 416 - protein, 208 aa, Artificial sequence
  synthetic sequence
  misc_feature (156)..(156): Xaa can be any amino acid other than serine
VIHVTKEVKEVATLSCGHNVSVEELAQTRIYWQKEKKMVLTMMSGDMNIWPEYKNRTIFDITNNLSIVILALRPSDEGTYECVVLKYEKDAFKREHLAEVTLSVKADFPTPSISDFEIPTSNIRRIICSTSGGFPEPHLSWLENGEELNAINTTVXQDPETELYAVSSKLDFNMTTNHSFMCLIKYGHLRVNQTFNWNTTKQEHFPDN

SEQ ID NO: 417 - protein, 208 aa, Artificial sequence
  synthetic sequence
  misc_feature (111)..(111): Xaa can be any amino acid other than proline
VIHVTKEVKEVATLSCGHNVSVEELAQTRIYWQKEKKMVLTMMSGDMNIWPEYKNRTIFDITNNLSIVILALRPSDEGTYECVVLKYEKDAFKREHLAEVTLSVKADFPTXSISDFEIPTSNIRRIICSTSGGFPEPHLSWLENGEELNAINTTVSQDPETELYAVSSKLDFNMTTNHSFMCLIKYGHLRVNQTFNWNTTKQEHFPDN

SEQ ID NO: 418 - protein, 224 aa, Artificial sequence
  synthetic sequence
  misc_feature (61)..(61): Xaa can be any amino acid other than asparagine
APLKIQAYFNETADLPCQFANSQNQSLSELVVFWQDQENLVLNEVYLGKEKFDSVHSKYMXRTSFDSDSWTLRLHNLQIKDKGLYQCIIHHKKPTGMIRIHQMNSELSVLANFSQPEIVPISNITENVYINLTCSSIHGYPEPKKMSVLLRTKNSTIEYDGIMQKSQDNVTELYDVSISLSVSFPDVTSNMTIFCILETDKTRLLSSPFSIELEDPQPPPDHIP

SEQ ID NO: 419 - protein, 224 aa, Artificial sequence
  synthetic sequence
  misc_feature (66)..(66): Xaa can be any amino acid other than aspartic acid
APLKIQAYFNETADLPCQFANSQNQSLSELVVFWQDQENLVLNEVYLGKEKFDSVHSKYMNRTSFXSDSWTLRLHNLQIKDKGLYQCIIHHKKPTGMIRIHQMNSELSVLANFSQPEIVPISNITENVYINLTCSSIHGYPEPKKMSVLLRTKNSTIEYDGIMQKSQDNVTELYDVSISLSVSFPDVTSNMTIFCILETDKTRLLSSPFSIELEDPQPPPDHIP

SEQ ID NO: 420 - protein, 224 aa, Artificial sequence
  synthetic sequence
  misc_feature (70)..(70): Xaa can be any amino acid other than tryptophan
APLKIQAYFNETADLPCQFANSQNQSLSELVVFWQDQENLVLNEVYLGKEKFDSVHSKYMNRTSFDSDSXTLRLHNLQIKDKGLYQCIIHHKKPTGMIRIHQMNSELSVLANFSQPEIVPISNITENVYINLTCSSIHGYPEPKKMSVLLRTKNSTIEYDGIMQKSQDNVTELYDVSISLSVSFPDVTSNMTIFCILETDKTRLLSSPFSIELEDPQPPPDHIP

SEQ ID NO: 421 - protein, 224 aa, Artificial sequence
  synthetic sequence
  misc_feature (91)..(91): Xaa can be any amino acid other than histidine
APLKIQAYFNETADLPCQFANSQNQSLSELVVFWQDQENLVLNEVYLGKEKFDSVHSKYMNRTSFDSDSWTLRLHNLQIKDKGLYQCIIHXKKPTGMIRIHQMNSELSVLANFSQPEIVPISNITENVYINLTCSSIHGYPEPKKMSVLLRTKNSTIEYDGIMQKSQDNVTELYDVSISLSVSFPDVTSNMTIFCILETDKTRLLSSPFSIELEDPQPPPDHIP

SEQ ID NO: 422 - protein, 110 aa, Artificial sequence
  synthetic sequence
  misc_feature (61)..(61): Xaa can be any amino acid other than asparagine
APLKIQAYFNETADLPCQFANSQNQSLSELVVFWQDQENLVLNEVYLGKEKFDSVHSKYMXRTSFDSDSWTLRLHNLQIKDKGLYQCIIHHKKPTGMIRIHQMNSELSVL

SEQ ID NO: 423 - protein, 110 aa, Artificial sequence
  synthetic sequence
  misc_feature (66)..(66): Xaa can be any amino acid other than aspartic acid
APLKIQAYFNETADLPCQFANSQNQSLSELVVFWQDQENLVLNEVYLGKEKFDSVHSKYMNRTSFXSDSWTLRLHNLQIKDKGLYQCIIHHKKPTGMIRIHQMNSELSVL

SEQ ID NO: 424 - protein, 110 aa, Artificial sequence
  synthetic sequence
  misc_feature (70)..(70): Xaa can be any amino acid other than tryptophan
APLKIQAYFNETADLPCQFANSQNQSLSELVVFWQDQENLVLNEVYLGKEKFDSVHSKYMNRTSFDSDSXTLRLHNLQIKDKGLYQCIIHHKKPTGMIRIHQMNSELSVL

SEQ ID NO: 425 - protein, 110 aa, Artificial sequence
  synthetic sequence
  misc_feature (91)..(91): Xaa can be any amino acid other than histidine
APLKIQAYFNETADLPCQFANSQNQSLSELVVFWQDQENLVLNEVYLGKEKFDSVHSKYMNRTSFDSDSWTLRLHNLQIKDKGLYQCIIHXKKPTGMIRIHQMNSELSVL

SEQ ID NO: 426 - protein, 224 aa, Artificial sequence
  synthetic sequence
  misc_feature (41)..(41): Xaa can be any amino acid other than valine
APLKIQAYFNETADLPCQFANSQNQSLSELVVFWQDQENLXLNEVYLGKEKFDSVHSKYMNRTSFDSDSWTLRLHNLQIKDKGLYQCIIHHKKPTGMIRIHQMNSELSVLANFSQPEIVPISNITENVYINLTCSSIHGYPEPKKMSVLLRTKNSTIEYDGIMQKSQDNVTELYDVSISLSVSFPDVTSNMTIFCILETDKTRLLSSPFSIELEDPQPPPDHIP

SEQ ID NO: 427 - protein, 110 aa, Artificial sequence
  synthetic sequence
  misc_feature (41)..(41): Xaa can be any amino acid other than valine
APLKIQAYFNETADLPCQFANSQNQSLSELVVFWQDQENLXLNEVYLGKEKFDSVHSKYMNRTSFDSDSWTLRLHNLQIKDKGLYQCIIHHKKPTGMIRIHQMNSELSVL

SEQ ID NO: 428 - protein, 224 aa, Artificial sequence
  synthetic sequence
  misc_feature (35)..(35): Xaa can be any amino acid other than glutamine
APLKIQAYFNETADLPCQFANSQNQSLSELVVFWXDQENLVLNEVYLGKEKFDSVHSKYMNRTSFDSDSWTLRLHNLQIKDKGLYQCIIHHKKPTGMIRIHQMNSELSVLANFSQPEIVPISNITENVYINLTCSSIHGYPEPKKMSVLLRTKNSTIEYDGIMQKSQDNVTELYDVSISLSVSFPDVTSNMTIFCILETDKTRLLSSPFSIELEDPQPPPDHIP

SEQ ID NO: 429 - protein, 110 aa, Artificial sequence
  synthetic sequence
  misc_feature (35)..(35): Xaa can be any amino acid other than glutamine
APLKIQAYFNETADLPCQFANSQNQSLSELVVFWXDQENLVLNEVYLGKEKFDSVHSKYMNRTSFDSDSWTLRLHNLQIKDKGLYQCIIHHKKPTGMIRIHQMNSELSVL

SEQ ID NO: 430 - protein, 224 aa, Artificial sequence
  synthetic sequence
  misc_feature (33)..(33): Xaa can be any amino acid other than phenylalanine
APLKIQAYFNETADLPCQFANSQNQSLSELVVXWQDQENLVLNEVYLGKEKFDSVHSKYMNRTSFDSDSWTLRLHNLQIKDKGLYQCIIHHKKPTGMIRIHQMNSELSVLANFSQPEIVPISNITENVYINLTCSSIHGYPEPKKMSVLLRTKNSTIEYDGIMQKSQDNVTELYDVSISLSVSFPDVTSNMTIFCILETDKTRLLSSPFSIELEDPQPPPDHIP

SEQ ID NO: 431 - protein, 110 aa, Artificial sequence
  synthetic sequence
  misc_feature (33)..(33): Xaa can be any amino acid other than phenylalanine
APLKIQAYFNETADLPCQFANSQNQSLSELVVXWQDQENLVLNEVYLGKEKFDSVHSKYMNRTSFDSDSWTLRLHNLQIKDKGLYQCIIHHKKPTGMIRIHQMNSELSVL

SEQ ID NO: 432 - protein, 224 aa, Artificial sequence
  synthetic sequence
  misc_feature (72)..(72): Xaa can be any amino acid other than leucine
APLKIQAYFNETADLPCQFANSQNQSLSELVVFWQDQENLVLNEVYLGKEKFDSVHSKYMNRTSFDSDSWTXRLHNLQIKDKGLYQCIIHHKKPTGMIRIHQMNSELSVLANFSQPEIVPISNITENVYINLTCSSIHGYPEPKKMSVLLRTKNSTIEYDGIMQKSQDNVTELYDVSISLSVSFPDVTSNMTIFCILETDKTRLLSSPFSIELEDPQPPPDHIP

SEQ ID NO: 433 - protein, 110 aa, Artificial sequence
  synthetic sequence
  misc_feature (72)..(72): Xaa can be any amino acid other than leucine
APLKIQAYFNETADLPCQFANSQNQSLSELVVFWQDQENLVLNEVYLGKEKFDSVHSKYMNRTSFDSDSWTXRLHNLQIKDKGLYQCIIHHKKPTGMIRIHQMNSELSVL

SEQ ID NO: 434 - protein, 224 aa, Artificial sequence
  synthetic sequence
  misc_feature (59)..(59): Xaa can be any amino acid other than tyrosine
APLKIQAYFNETADLPCQFANSQNQSLSELVVFWQDQENLVLNEVYLGKEKFDSVHSKXMNRTSFDSDSWTLRLHNLQIKDKGLYQCIIHHKKPTGMIRIHQMNSELSVLANFSQPEIVPISNITENVYINLTCSSIHGYPEPKKMSVLLRTKNSTIEYDGIMQKSQDNVTELYDVSISLSVSFPDVTSNMTIFCILETDKTRLLSSPFSIELEDPQPPPDHIP

SEQ ID NO: 435 - protein, 110 aa, Artificial sequence
  synthetic sequence
  misc_feature (59)..(59): Xaa can be any amino acid other than tyrosine
APLKIQAYFNETADLPCQFANSQNQSLSELVVFWQDQENLVLNEVYLGKEKFDSVHSKXMNRTSFDSDSWTLRLHNLQIKDKGLYQCIIHHKKPTGMIRIHQMNSELSVL

SEQ ID NO: 436 - protein, 224 aa, Artificial sequence
  synthetic sequence
  misc_feature (61)..(61): Xaa can be any amino acid other than asparagine
  misc_feature (91)..(91): Xaa can be any amino acid other than histidine
APLKIQAYFNETADLPCQFANSQNQSLSELVVFWQDQENLVLNEVYLGKEKFDSVHSKYMXRTSFDSDSWTLRLHNLQIKDKGLYQCIIHXKKPTGMIRIHQMNSELSVLANFSQPEIVPISNITENVYINLTCSSIHGYPEPKKMSVLLRTKNSTIEYDGIMQKSQDNVTELYDVSISLSVSFPDVTSNMTIFCILETDKTRLLSSPFSIELEDPQPPPDHIP

SEQ ID NO: 437 - protein, 110 aa, Artificial sequence
  synthetic sequence
  misc_feature (61)..(61): Xaa can be any amino acid other than asparagine
  misc_feature (91)..(91): Xaa can be any amino acid other than histidine
APLKIQAYFNETADLPCQFANSQNQSLSELVVFWQDQENLVLNEVYLGKEKFDSVHSKYMXRTSFDSDSWTLRLHNLQIKDKGLYQCIIHXKKPTGMIRIHQMNSELSVL

SEQ ID NO: 438 - protein, 224 aa, Artificial sequence
  synthetic sequence
  misc_feature (66)..(66): Xaa can be any amino acid other than aspartic acid
  misc_feature (91)..(91): Xaa can be any amino acid other than histidine
APLKIQAYFNETADLPCQFANSQNQSLSELVVFWQDQENLVLNEVYLGKEKFDSVHSKYMNRTSFXSDSWTLRLHNLQIKDKGLYQCIIHXKKPTGMIRIHQMNSELSVLANFSQPEIVPISNITENVYINLTCSSIHGYPEPKKMSVLLRTKNSTIEYDGIMQKSQDNVTELYDVSISLSVSFPDVTSNMTIFCILETDKTRLLSSPFSIELEDPQPPPDHIP

SEQ ID NO: 439 - protein, 110 aa, Artificial sequence
  synthetic sequence
  misc_feature (66)..(66): Xaa can be any amino acid other than asparagine
  misc_feature (91)..(91): Xaa can be any amino acid other than His
APLKIQAYFNETADLPCQFANSQNQSLSELVVFWQDQENLVLNEVYLGKEKFDSVHSKYMNRTSFXSDSWTLRLHNLQIKDKGLYQCIIHXKKPTGMIRIHQMNSELSVL

SEQ ID NO: 440 - protein, 224 aa, Artificial sequence
  synthetic sequence
  misc_feature (61)..(61): Xaa can be any amino acid other than asparagine
  misc_feature (66)..(66): Xaa can be any amino acid other than aspartic acid
  misc_feature (91)..(91): Xaa can be any amino acid other than histidine
APLKIQAYFNETADLPCQFANSQNQSLSELVVFWQDQENLVLNEVYLGKEKFDSVHSKYMXRTSFXSDSWTLRLHNLQIKDKGLYQCIIHXKKPTGMIRIHQMNSELSVLANFSQPEIVPISNITENVYINLTCSSIHGYPEPKKMSVLLRTKNSTIEYDGIMQKSQDNVTELYDVSISLSVSFPDVTSNMTIFCILETDKTRLLSSPFSIELEDPQPPPDHIP

SEQ ID NO: 441 - protein, 110 aa, Artificial sequence
  synthetic sequence
  misc_feature (61)..(61): Xaa can be any amino acid other than asparagine
  misc_feature (66)..(66): Xaa can be any amino acid other than aspartic acid
  misc_feature (91)..(91): Xaa can be any amino acid other than histidine
APLKIQAYFNETADLPCQFANSQNQSLSELVVFWQDQENLVLNEVYLGKEKFDSVHSKYMXRTSFXSDSWTLRLHNLQIKDKGLYQCIIHXKKPTGMIRIHQMNSELSVL

SEQ ID NO: 442 - protein, 174 aa, Artificial sequence
  synthetic sequence
  misc_feature (47)..(47): Xaa can be any amino acid other than lysine
PAGLLDLRQGMFAQLVAQNVLLIDGPLSWYSDPGLAGVSLTGGLSYXEDTKELVVAKAGVYYVFFQLELRRVVAGEGSGSVSLALHLQPLRSAAGAAALALTVDLPPASSEARNSAFGFQGRLLHLSAGQRLGVHLHTEARARHAWQLTQGATVLGLFRVTPEIPAGLPSPRSE

SEQ ID NO: 443 - protein, 174 aa, Artificial sequence
  synthetic sequence
  misc_feature (147)..(147): Xaa can be any amino acid other than glutamine
PAGLLDLRQGMFAQLVAQNVLLIDGPLSWYSDPGLAGVSLTGGLSYKEDTKELVVAKAGVYYVFFQLELRRVVAGEGSGSVSLALHLQPLRSAAGAAALALTVDLPPASSEARNSAFGFQGRLLHLSAGQRLGVHLHTEARARHAWXLTQGATVLGLFRVTPEIPAGLPSPRSE

SEQ ID NO: 444 - protein, 174 aa, Artificial sequence
  synthetic sequence
  misc_feature (11)..(11): Xaa can be any amino acid other than methionine
PAGLLDLRQGXFAQLVAQNVLLIDGPLSWYSDPGLAGVSLTGGLSYKEDTKELVVAKAGVYYVFFQLELRRVVAGEGSGSVSLALHLQPLRSAAGAAALALTVDLPPASSEARNSAFGFQGRLLHLSAGQRLGVHLHTEARARHAWQLTQGATVLGLFRVTPEIPAGLPSPRSE

SEQ ID NO: 445 - protein, 174 aa, Artificial sequence
  synthetic sequence
  misc_feature (12)..(12): Xaa can be any amino acid other than phenylalanine
PAGLLDLRQGMXAQLVAQNVLLIDGPLSWYSDPGLAGVSLTGGLSYKEDTKELVVAKAGVYYVFFQLELRRVVAGEGSGSVSLALHLQPLRSAAGAAALALTVDLPPASSEARNSAFGFQGRLLHLSAGQRLGVHLHTEARARHAWQLTQGATVLGLFRVTPEIPAGLPSPRSE

SEQ ID NO: 446 - protein, 174 aa, Artificial sequence
  synthetic sequence
  misc_feature (14)..(14): Xaa can be any amino acid other than glutamine
PAGLLDLRQGMFAXLVAQNVLLIDGPLSWYSDPGLAGVSLTGGLSYKEDTKELVVAKAGVYYVFFQLELRRVVAGEGSGSVSLALHLQPLRSAAGAAALALTVDLPPASSEARNSAFGFQGRLLHLSAGQRLGVHLHTEARARHAWQLTQGATVLGLFRVTPEIPAGLPSPRSE

SEQ ID NO: 447 - protein, 174 aa, Artificial sequence
  synthetic sequence
  misc_feature (15)..(15): Xaa can be any amino acid other than leucine
PAGLLDLRQGMFAQXVAQNVLLIDGPLSWYSDPGLAGVSLTGGLSYKEDTKELVVAKAGVYYVFFQLELRRVVAGEGSGSVSLALHLQPLRSAAGAAALALTVDLPPASSEARNSAFGFQGRLLHLSAGQRLGVHLHTEARARHAWQLTQGATVLGLFRVTPEIPAGLPSPRSE

SEQ ID NO: 448 - protein, 174 aa, Artificial sequence
  synthetic sequence
  misc_feature (16)..(16): Xaa can be any amino acid other than valine
PAGLLDLRQGMFAQLXAQNVLLIDGPLSWYSDPGLAGVSLTGGLSYKEDTKELVVAKAGVYYVFFQLELRRVVAGEGSGSVSLALHLQPLRSAAGAAALALTVDLPPASSEARNSAFGFQGRLLHLSAGQRLGVHLHTEARARHAWQLTQGATVLGLFRVTPEIPAGLPSPRSE

SEQ ID NO: 449 - protein, 174 aa, Artificial sequence
  synthetic sequence
  misc_feature (18)..(18): Xaa can be any amino acid other than glutamine
PAGLLDLRQGMFAQLVAXNVLLIDGPLSWYSDPGLAGVSLTGGLSYKEDTKELVVAKAGVYYVFFQLELRRVVAGEGSGSVSLALHLQPLRSAAGAAALALTVDLPPASSEARNSAFGFQGRLLHLSAGQRLGVHLHTEARARHAWQLTQGATVLGLFRVTPEIPAGLPSPRSE

SEQ ID NO: 450 - protein, 174 aa, Artificial sequence
  synthetic sequence
  misc_feature (19)..(19): Xaa can be any amino acid other than asparagine
PAGLLDLRQGMFAQLVAQXVLLIDGPLSWYSDPGLAGVSLTGGLSYKEDTKELVVAKAGVYYVFFQLELRRVVAGEGSGSVSLALHLQPLRSAAGAAALALTVDLPPASSEARNSAFGFQGRLLHLSAGQRLGVHLHTEARARHAWQLTQGATVLGLFRVTPEIPAGLPSPRSE

SEQ ID NO: 451 - protein, 174 aa, Artificial sequence
  synthetic sequence
  misc_feature (20)..(20): Xaa can be any amino acid other than valine
PAGLLDLRQGMFAQLVAQNXLLIDGPLSWYSDPGLAGVSLTGGLSYKEDTKELVVAKAGVYYVFFQLELRRVVAGEGSGSVSLALHLQPLRSAAGAAALALTVDLPPASSEARNSAFGFQGRLLHLSAGQRLGVHLHTEARARHAWQLTQGATVLGLFRVTPEIPAGLPSPRSE

SEQ ID NO: 452 - protein, 174 aa, Artificial sequence
  synthetic sequence
  misc_feature (21)..(21): Xaa can be any amino acid other than leucine
PAGLLDLRQGMFAQLVAQNVXLIDGPLSWYSDPGLAGVSLTGGLSYKEDTKELVVAKAGVYYVFFQLELRRVVAGEGSGSVSLALHLQPLRSAAGAAALALTVDLPPASSEARNSAFGFQGRLLHLSAGQRLGVHLHTEARARHAWQLTQGATVLGLFRVTPEIPAGLPSPRSE

SEQ ID NO: 453 - protein, 174 aa, Artificial sequence
  synthetic sequence
  misc_feature (22)..(22): Xaa can be any amino acid other than leucine
PAGLLDLRQGMFAQLVAQNVLXIDGPLSWYSDPGLAGVSLTGGLSYKEDTKELVVAKAGVYYVFFQLELRRVVAGEGSGSVSLALHLQPLRSAAGAAALALTVDLPPASSEARNSAFGFQGRLLHLSAGQRLGVHLHTEARARHAWQLTQGATVLGLFRVTPEIPAGLPSPRSE

SEQ ID NO: 454 - protein, 174 aa, Artificial sequence
  synthetic sequence
  misc_feature (23)..(23): Xaa can be any amino acid other than isoleucine
PAGLLDLRQGMFAQLVAQNVLLXDGPLSWYSDPGLAGVSLTGGLSYKEDTKELVVAKAGVYYVFFQLELRRVVAGEGSGSVSLALHLQPLRSAAGAAALALTVDLPPASSEARNSAFGFQGRLLHLSAGQRLGVHLHTEARARHAWQLTQGATVLGLFRVTPEIPAGLPSPRSE

SEQ ID NO: 455 - protein, 174 aa, Artificial sequence
  synthetic sequence
  misc_feature (24)..(24): Xaa can be any amino acid other than aspartic acid
PAGLLDLRQGMFAQLVAQNVLLIXGPLSWYSDPGLAGVSLTGGLSYKEDTKELVVAKAGVYYVFFQLELRRVVAGEGSGSVSLALHLQPLRSAAGAAALALTVDLPPASSEARNSAFGFQGRLLHLSAGQRLGVHLHTEARARHAWQLTQGATVLGLFRVTPEIPAGLPSPRSE

SEQ ID NO: 456 - protein, 174 aa, Artificial sequence
  synthetic sequence
  misc_feature (25)..(25): Xaa can be any amino acid other than glycine
PAGLLDLRQGMFAQLVAQNVLLIDXPLSWYSDPGLAGVSLTGGLSYKEDTKELVVAKAGVYYVFFQLELRRVVAGEGSGSVSLALHLQPLRSAAGAAALALTVDLPPASSEARNSAFGFQGRLLHLSAGQRLGVHLHTEARARHAWQLTQGATVLGLFRVTPEIPAGLPSPRSE

SEQ ID NO: 457 - protein, 174 aa, Artificial sequence
  synthetic sequence
  misc_feature (26)..(26): Xaa can be any amino acid other than proline
PAGLLDLRQGMFAQLVAQNVLLIDGXLSWYSDPGLAGVSLTGGLSYKEDTKELVVAKAGVYYVFFQLELRRVVAGEGSGSVSLALHLQPLRSAAGAAALALTVDLPPASSEARNSAFGFQGRLLHLSAGQRLGVHLHTEARARHAWQLTQGATVLGLFRVTPEIPAGLPSPRSE

SEQ ID NO: 458 - protein, 174 aa, Artificial sequence
  synthetic sequence
  misc_feature (27)..(27): Xaa can be any amino acid other than leucine
PAGLLDLRQGMFAQLVAQNVLLIDGPXSWYSDPGLAGVSLTGGLSYKEDTKELVVAKAGVYYVFFQLELRRVVAGEGSGSVSLALHLQPLRSAAGAAALALTVDLPPASSEARNSAFGFQGRLLHLSAGQRLGVHLHTEARARHAWQLTQGATVLGLFRVTPEIPAGLPSPRSE

SEQ ID NO: 459 - protein, 174 aa, Artificial sequence
  synthetic sequence
  misc_feature (28)..(28): Xaa can be any amino acid other than serine
PAGLLDLRQGMFAQLVAQNVLLIDGPLXWYSDPGLAGVSLTGGLSYKEDTKELVVAKAGVYYVFFQLELRRVVAGEGSGSVSLALHLQPLRSAAGAAALALTVDLPPASSEARNSAFGFQGRLLHLSAGQRLGVHLHTEARARHAWQLTQGATVLGLFRVTPEIPAGLPSPRSE

SEQ ID NO: 460 - protein, 174 aa, Artificial sequence
  synthetic sequence
  misc_feature (29)..(29): Xaa can be any amino acid other than tryptophan
PAGLLDLRQGMFAQLVAQNVLLIDGPLSXYSDPGLAGVSLTGGLSYKEDTKELVVAKAGVYYVFFQLELRRVVAGEGSGSVSLALHLQPLRSAAGAAALALTVDLPPASSEARNSAFGFQGRLLHLSAGQRLGVHLHTEARARHAWQLTQGATVLGLFRVTPEIPAGLPSPRSE

SEQ ID NO: 461 - protein, 174 aa, Artificial sequence
  synthetic sequence
  misc_feature (30)..(30): Xaa can be any amino acid other than tyrosine
PAGLLDLRQGMFAQLVAQNVLLIDGPLSWXSDPGLAGVSLTGGLSYKEDTKELVVAKAGVYYVFFQLELRRVVAGEGSGSVSLALHLQPLRSAAGAAALALTVDLPPASSEARNSAFGFQGRLLHLSAGQRLGVHLHTEARARHAWQLTQGATVLGLFRVTPEIPAGLPSPRSE

SEQ ID NO: 462 - protein, 174 aa, Artificial sequence
  synthetic sequence
  misc_feature (31)..(31): Xaa can be any amino acid other than serine
PAGLLDLRQGMFAQLVAQNVLLIDGPLSWYXDPGLAGVSLTGGLSYKEDTKELVVAKAGVYYVFFQLELRRVVAGEGSGSVSLALHLQPLRSAAGAAALALTVDLPPASSEARNSAFGFQGRLLHLSAGQRLGVHLHTEARARHAWQLTQGATVLGLFRVTPEIPAGLPSPRSE

SEQ ID NO: 463 - protein, 174 aa, Artificial sequence
  synthetic sequence
  misc_feature (32)..(32): Xaa can be any amino acid other than aspartic acid
PAGLLDLRQGMFAQLVAQNVLLIDGPLSWYSXPGLAGVSLTGGLSYKEDTKELVVAKAGVYYVFFQLELRRVVAGEGSGSVSLALHLQPLRSAAGAAALALTVDLPPASSEARNSAFGFQGRLLHLSAGQRLGVHLHTEARARHAWQLTQGATVLGLFRVTPEIPAGLPSPRSE

SEQ ID NO: 464 - protein, 174 aa, Artificial sequence
  synthetic sequence
  misc_feature (33)..(33): Xaa can be any amino acid other than proline
PAGLLDLRQGMFAQLVAQNVLLIDGPLSWYSDXGLAGVSLTGGLSYKEDTKELVVAKAGVYYVFFQLELRRVVAGEGSGSVSLALHLQPLRSAAGAAALALTVDLPPASSEARNSAFGFQGRLLHLSAGQRLGVHLHTEARARHAWQLTQGATVLGLFRVTPEIPAGLPSPRSE

SEQ ID NO: 465 - protein, 174 aa, Artificial sequence
  synthetic sequence
  misc_feature (34)..(34): Xaa can be any amino acid other than glycine
PAGLLDLRQGMFAQLVAQNVLLIDGPLSWYSDPXLAGVSLTGGLSYKEDTKELVVAKAGVYYVFFQLELRRVVAGEGSGSVSLALHLQPLRSAAGAAALALTVDLPPASSEARNSAFGFQGRLLHLSAGQRLGVHLHTEARARHAWQLTQGATVLGLFRVTPEIPAGLPSPRSE

SEQ ID NO: 466 - protein, 174 aa, Artificial sequence
  synthetic sequence
  misc_feature (35)..(35): Xaa can be any amino acid other than leucine
PAGLLDLRQGMFAQLVAQNVLLIDGPLSWYSDPGXAGVSLTGGLSYKEDTKELVVAKAGVYYVFFQLELRRVVAGEGSGSVSLALHLQPLRSAAGAAALALTVDLPPASSEARNSAFGFQGRLLHLSAGQRLGVHLHTEARARHAWQLTQGATVLGLFRVTPEIPAGLPSPRSE

SEQ ID NO: 467 - protein, 174 aa, Artificial sequence
  synthetic sequence
  misc_feature (37)..(37): Xaa can be any amino acid other than glycine
PAGLLDLRQGMFAQLVAQNVLLIDGPLSWYSDPGLAXVSLTGGLSYKEDTKELVVAKAGVYYVFFQLELRRVVAGEGSGSVSLALHLQPLRSAAGAAALALTVDLPPASSEARNSAFGFQGRLLHLSAGQRLGVHLHTEARARHAWQLTQGATVLGLFRVTPEIPAGLPSPRSE

SEQ ID NO: 468 - protein, 174 aa, Artificial sequence
  synthetic sequence
  misc_feature (38)..(38): Xaa can be any amino acid other than valine
PAGLLDLRQGMFAQLVAQNVLLIDGPLSWYSDPGLAGXSLTGGLSYKEDTKELVVAKAGVYYVFFQLELRRVVAGEGSGSVSLALHLQPLRSAAGAAALALTVDLPPASSEARNSAFGFQGRLLHLSAGQRLGVHLHTEARARHAWQLTQGATVLGLFRVTPEIPAGLPSPRSE

SEQ ID NO: 469 - protein, 174 aa, Artificial sequence
  synthetic sequence
  misc_feature (39)..(39): Xaa can be any amino acid other than serine
PAGLLDLRQGMFAQLVAQNVLLIDGPLSWYSDPGLAGVXLTGGLSYKEDTKELVVAKAGVYYVFFQLELRRVVAGEGSGSVSLALHLQPLRSAAGAAALALTVDLPPASSEARNSAFGFQGRLLHLSAGQRLGVHLHTEARARHAWQLTQGATVLGLFRVTPEIPAGLPSPRSE

SEQ ID NO: 470 - protein, 174 aa, Artificial sequence
  synthetic sequence
  misc_feature (40)..(40): Xaa can be any amino acid other than leucine
PAGLLDLRQGMFAQLVAQNVLLIDGPLSWYSDPGLAGVSXTGGLSYKEDTKELVVAKAGVYYVFFQLELRRVVAGEGSGSVSLALHLQPLRSAAGAAALALTVDLPPASSEARNSAFGFQGRLLHLSAGQRLGVHLHTEARARHAWQLTQGATVLGLFRVTPEIPAGLPSPRSE

SEQ ID NO: 471 - protein, 174 aa, Artificial sequence
  synthetic sequence
  misc_feature (41)..(41): Xaa can be any amino acid other than threonine
PAGLLDLRQGMFAQLVAQNVLLIDGPLSWYSDPGLAGVSLXGGLSYKEDTKELVVAKAGVYYVFFQLELRRVVAGEGSGSVSLALHLQPLRSAAGAAALALTVDLPPASSEARNSAFGFQGRLLHLSAGQRLGVHLHTEARARHAWQLTQGATVLGLFRVTPEIPAGLPSPRSE

SEQ ID NO: 472 - protein, 174 aa, Artificial sequence
  synthetic sequence
  misc_feature (42)..(42): Xaa can be any amino acid other than glycine
PAGLLDLRQGMFAQLVAQNVLLIDGPLSWYSDPGLAGVSLTXGLSYKEDTKELVVAKAGVYYVFFQLELRRVVAGEGSGSVSLALHLQPLRSAAGAAALALTVDLPPASSEARNSAFGFQGRLLHLSAGQRLGVHLHTEARARHAWQLTQGATVLGLFRVTPEIPAGLPSPRSE

SEQ ID NO: 473 - protein, 174 aa, Artificial sequence
  synthetic sequence
  misc_feature (43)..(43): Xaa can be any amino acid other than glycine
PAGLLDLRQGMFAQLVAQNVLLIDGPLSWYSDPGLAGVSLTGXLSYKEDTKELVVAKAGVYYVFFQLELRRVVAGEGSGSVSLALHLQPLRSAAGAAALALTVDLPPASSEARNSAFGFQGRLLHLSAGQRLGVHLHTEARARHAWQLTQGATVLGLFRVTPEIPAGLPSPRSE

SEQ ID NO: 474 - protein, 174 aa, Artificial sequence
  synthetic sequence
  misc_feature (44)..(44): Xaa can be any amino acid other than leucine
PAGLLDLRQGMFAQLVAQNVLLIDGPLSWYSDPGLAGVSLTGGXSYKEDTKELVVAKAGVYYVFFQLELRRVVAGEGSGSVSLALHLQPLRSAAGAAALALTVDLPPASSEARNSAFGFQGRLLHLSAGQRLGVHLHTEARARHAWQLTQGATVLGLFRVTPEIPAGLPSPRSE

SEQ ID NO: 475 - protein, 174 aa, Artificial sequence
  synthetic sequence
  misc_feature (45)..(45): Xaa can be any amino acid other than serine
PAGLLDLRQGMFAQLVAQNVLLIDGPLSWYSDPGLAGVSLTGGLXYKEDTKELVVAKAGVYYVFFQLELRRVVAGEGSGSVSLALHLQPLRSAAGAAALALTVDLPPASSEARNSAFGFQGRLLHLSAGQRLGVHLHTEARARHAWQLTQGATVLGLFRVTPEIPAGLPSPRSE

SEQ ID NO: 476 - protein, 174 aa, Artificial sequence
  synthetic sequence
  misc_feature (46)..(46): Xaa can be any amino acid other than tyrosine
PAGLLDLRQGMFAQLVAQNVLLIDGPLSWYSDPGLAGVSLTGGLSXKEDTKELVVAKAGVYYVFFQLELRRVVAGEGSGSVSLALHLQPLRSAAGAAALALTVDLPPASSEARNSAFGFQGRLLHLSAGQRLGVHLHTEARARHAWQLTQGATVLGLFRVTPEIPAGLPSPRSE

SEQ ID NO: 477 - protein, 174 aa, Artificial sequence
  synthetic sequence
  misc_feature (48)..(48): Xaa can be any amino acid other than glutamic acid
PAGLLDLRQGMFAQLVAQNVLLIDGPLSWYSDPGLAGVSLTGGLSYKXDTKELVVAKAGVYYVFFQLELRRVVAGEGSGSVSLALHLQPLRSAAGAAALALTVDLPPASSEARNSAFGFQGRLLHLSAGQRLGVHLHTEARARHAWQLTQGATVLGLFRVTPEIPAGLPSPRSE

SEQ ID NO: 478 - protein, 174 aa, Artificial sequence
  synthetic sequence
  misc_feature (49)..(49): Xaa can be any amino acid other than aspartic acid
PAGLLDLRQGMFAQLVAQNVLLIDGPLSWYSDPGLAGVSLTGGLSYKEXTKELVVAKAGVYYVFFQLELRRVVAGEGSGSVSLALHLQPLRSAAGAAALALTVDLPPASSEARNSAFGFQGRLLHLSAGQRLGVHLHTEARARHAWQLTQGATVLGLFRVTPEIPAGLPSPRSE

SEQ ID NO: 479 - protein, 174 aa, Artificial sequence
  synthetic sequence
  misc_feature (50)..(50): Xaa can be any amino acid other than threonine
PAGLLDLRQGMFAQLVAQNVLLIDGPLSWYSDPGLAGVSLTGGLSYKEDXKELVVAKAGVYYVFFQLELRRVVAGEGSGSVSLALHLQPLRSAAGAAALALTVDLPPASSEARNSAFGFQGRLLHLSAGQRLGVHLHTEARARHAWQLTQGATVLGLFRVTPEIPAGLPSPRSE

SEQ ID NO: 480 - protein, 174 aa, Artificial sequence
  synthetic sequence
  misc_feature (51)..(51): Xaa can be any amino acid other than lysine
PAGLLDLRQGMFAQLVAQNVLLIDGPLSWYSDPGLAGVSLTGGLSYKEDTXELVVAKAGVYYVFFQLELRRVVAGEGSGSVSLALHLQPLRSAAGAAALALTVDLPPASSEARNSAFGFQGRLLHLSAGQRLGVHLHTEARARHAWQLTQGATVLGLFRVTPEIPAGLPSPRSE

SEQ ID NO: 481 - protein, 174 aa, Artificial sequence
  synthetic sequence
  misc_feature (52)..(52): Xaa can be any amino acid other than glutamic acid
PAGLLDLRQGMFAQLVAQNVLLIDGPLSWYSDPGLAGVSLTGGLSYKEDTKXLVVAKAGVYYVFFQLELRRVVAGEGSGSVSLALHLQPLRSAAGAAALALTVDLPPASSEARNSAFGFQGRLLHLSAGQRLGVHLHTEARARHAWQLTQGATVLGLFRVTPEIPAGLPSPRSE

SEQ ID NO: 482 - protein, 174 aa, Artificial sequence
  synthetic sequence
  misc_feature (64)..(64): Xaa can be any amino acid other than phenylalanine
PAGLLDLRQGMFAQLVAQNVLLIDGPLSWYSDPGLAGVSLTGGLSYKEDTKELVVAKAGVYYVXFQLELRRVVAGEGSGSVSLALHLQPLRSAAGAAALALTVDLPPASSEARNSAFGFQGRLLHLSAGQRLGVHLHTEARARHAWQLTQGATVLGLFRVTPEIPAGLPSPRSE

SEQ ID NO: 483 - protein, 174 aa, Artificial sequence
  synthetic sequence
  misc_feature (65)..(65): Xaa can be any amino acid other than phenylalanine
PAGLLDLRQGMFAQLVAQNVLLIDGPLSWYSDPGLAGVSLTGGLSYKEDTKELVVAKAGVYYVFXQLELRRVVAGEGSGSVSLALHLQPLRSAAGAAALALTVDLPPASSEARNSAFGFQGRLLHLSAGQRLGVHLHTEARARHAWQLTQGATVLGLFRVTPEIPAGLPSPRSE

SEQ ID NO: 484 - protein, 174 aa, Artificial sequence
  synthetic sequence
  misc_feature (66)..(66): Xaa can be any amino acid other than glutamine
PAGLLDLRQGMFAQLVAQNVLLIDGPLSWYSDPGLAGVSLTGGLSYKEDTKELVVAKAGVYYVFFXLELRRVVAGEGSGSVSLALHLQPLRSAAGAAALALTVDLPPASSEARNSAFGFQGRLLHLSAGQRLGVHLHTEARARHAWQLTQGATVLGLFRVTPEIPAGLPSPRSE

SEQ ID NO: 485 - protein, 174 aa, Artificial sequence
  synthetic sequence
  misc_feature (67)..(67): Xaa can be any amino acid other than leucine
PAGLLDLRQGMFAQLVAQNVLLIDGPLSWYSDPGLAGVSLTGGLSYKEDTKELVVAKAGVYYVFFQXELRRVVAGEGSGSVSLALHLQPLRSAAGAAALALTVDLPPASSEARNSAFGFQGRLLHLSAGQRLGVHLHTEARARHAWQLTQGATVLGLFRVTPEIPAGLPSPRSE

SEQ ID NO: 486 - protein, 174 aa, Artificial sequence
  synthetic sequence
  misc_feature (68)..(68): Xaa can be any amino acid other than glutamic acid
PAGLLDLRQGMFAQLVAQNVLLIDGPLSWYSDPGLAGVSLTGGLSYKEDTKELVVAKAGVYYVFFQLXLRRVVAGEGSGSVSLALHLQPLRSAAGAAALALTVDLPPASSEARNSAFGFQGRLLHLSAGQRLGVHLHTEARARHAWQLTQGATVLGLFRVTPEIPAGLPSPRSE

SEQ ID NO: 487 - protein, 174 aa, Artificial sequence
  synthetic sequence
  misc_feature (69)..(69): Xaa can be any amino acid other than leucine
PAGLLDLRQGMFAQLVAQNVLLIDGPLSWYSDPGLAGVSLTGGLSYKEDTKELVVAKAGVYYVFFQLEXRRVVAGEGSGSVSLALHLQPLRSAAGAAALALTVDLPPASSEARNSAFGFQGRLLHLSAGQRLGVHLHTEARARHAWQLTQGATVLGLFRVTPEIPAGLPSPRSE

SEQ ID NO: 488 - protein, 174 aa, Artificial sequence
  synthetic sequence
  misc_feature (70)..(70): Xaa can be any amino acid other than arginine
PAGLLDLRQGMFAQLVAQNVLLIDGPLSWYSDPGLAGVSLTGGLSYKEDTKELVVAKAGVYYVFFQLELXRVVAGEGSGSVSLALHLQPLRSAAGAAALALTVDLPPASSEARNSAFGFQGRLLHLSAGQRLGVHLHTEARARHAWQLTQGATVLGLFRVTPEIPAGLPSPRSE

SEQ ID NO: 489 - protein, 174 aa, Artificial sequence
  synthetic sequence
  misc_feature (71)..(71): Xaa can be any amino acid other than arginine
PAGLLDLRQGMFAQLVAQNVLLIDGPLSWYSDPGLAGVSLTGGLSYKEDTKELVVAKAGVYYVFFQLELRXVVAGEGSGSVSLALHLQPLRSAAGAAALALTVDLPPASSEARNSAFGFQGRLLHLSAGQRLGVHLHTEARARHAWQLTQGATVLGLFRVTPEIPAGLPSPRSE

SEQ ID NO: 490 - protein, 174 aa, Artificial sequence
  synthetic sequence
  misc_feature (72)..(72): Xaa can be any amino acid other than valine
PAGLLDLRQGMFAQLVAQNVLLIDGPLSWYSDPGLAGVSLTGGLSYKEDTKELVVAKAGVYYVFFQLELRRXVAGEGSGSVSLALHLQPLRSAAGAAALALTVDLPPASSEARNSAFGFQGRLLHLSAGQRLGVHLHTEARARHAWQLTQGATVLGLFRVTPEIPAGLPSPRSE

SEQ ID NO: 491 - protein, 174 aa, Artificial sequence
  synthetic sequence
  misc_feature (73)..(73): Xaa can be any amino acid other than valine
PAGLLDLRQGMFAQLVAQNVLLIDGPLSWYSDPGLAGVSLTGGLSYKEDTKELVVAKAGVYYVFFQLELRRVXAGEGSGSVSLALHLQPLRSAAGAAALALTVDLPPASSEARNSAFGFQGRLLHLSAGQRLGVHLHTEARARHAWQLTQGATVLGLFRVTPEIPAGLPSPRSE

SEQ ID NO: 492 - protein, 174 aa, Artificial sequence
  synthetic sequence
  misc_feature (75)..(75): Xaa can be any amino acid other than glycine
PAGLLDLRQGMFAQLVAQNVLLIDGPLSWYSDPGLAGVSLTGGLSYKEDTKELVVAKAGVYYVFFQLELRRVVAXEGSGSVSLALHLQPLRSAAGAAALALTVDLPPASSEARNSAFGFQGRLLHLSAGQRLGVHLHTEARARHAWQLTQGATVLGLFRVTPEIPAGLPSPRSE

SEQ ID NO: 493 - protein, 174 aa, Artificial sequence
  synthetic sequence
  misc_feature (76)..(76): Xaa can be any amino acid other than glutamic acid
PAGLLDLRQGMFAQLVAQNVLLIDGPLSWYSDPGLAGVSLTGGLSYKEDTKELVVAKAGVYYVFFQLELRRVVAGXGSGSVSLALHLQPLRSAAGAAALALTVDLPPASSEARNSAFGFQGRLLHLSAGQRLGVHLHTEARARHAWQLTQGATVLGLFRVTPEIPAGLPSPRSE

SEQ ID NO: 494 - protein, 174 aa, Artificial sequence
  synthetic sequence
  misc_feature (77)..(77): Xaa can be any amino acid other than glycine
PAGLLDLRQGMFAQLVAQNVLLIDGPLSWYSDPGLAGVSLTGGLSYKEDTKELVVAKAGVYYVFFQLELRRVVAGEXSGSVSLALHLQPLRSAAGAAALALTVDLPPASSEARNSAFGFQGRLLHLSAGQRLGVHLHTEARARHAWQLTQGATVLGLFRVTPEIPAGLPSPRSE

SEQ ID NO: 495 - protein, 174 aa, Artificial sequence
  synthetic sequence
  misc_feature (78)..(78): Xaa can be any amino acid other than serine
PAGLLDLRQGMFAQLVAQNVLLIDGPLSWYSDPGLAGVSLTGGLSYKEDTKELVVAKAGVYYVFFQLELRRVVAGEGXGSVSLALHLQPLRSAAGAAALALTVDLPPASSEARNSAFGFQGRLLHLSAGQRLGVHLHTEARARHAWQLTQGATVLGLFRVTPEIPAGLPSPRSE

SEQ ID NO: 496 - protein, 174 aa, Artificial sequence
  synthetic sequence
  misc_feature (104)..(104): Xaa can be any amino acid other than aspartic acid
PAGLLDLRQGMFAQLVAQNVLLIDGPLSWYSDPGLAGVSLTGGLSYKEDTKELVVAKAGVYYVFFQLELRRVVAGEGSGSVSLALHLQPLRSAAGAAALALTVXLPPASSEARNSAFGFQGRLLHLSAGQRLGVHLHTEARARHAWQLTQGATVLGLFRVTPEIPAGLPSPRSE

SEQ ID NO: 497 - protein, 174 aa, Artificial sequence
  synthetic sequence
  misc_feature (105)..(105): Xaa can be any amino acid other than leucine
PAGLLDLRQGMFAQLVAQNVLLIDGPLSWYSDPGLAGVSLTGGLSYKEDTKELVVAKAGVYYVFFQLELRRVVAGEGSGSVSLALHLQPLRSAAGAAALALTVDXPPASSEARNSAFGFQGRLLHLSAGQRLGVHLHTEARARHAWQLTQGATVLGLFRVTPEIPAGLPSPRSE

SEQ ID NO: 498 - protein, 174 aa, Artificial sequence
  synthetic sequence
  misc_feature (106)..(106): Xaa can be any amino acid other than proline
PAGLLDLRQGMFAQLVAQNVLLIDGPLSWYSDPGLAGVSLTGGLSYKEDTKELVVAKAGVYYVFFQLELRRVVAGEGSGSVSLALHLQPLRSAAGAAALALTVDLXPASSEARNSAFGFQGRLLHLSAGQRLGVHLHTEARARHAWQLTQGATVLGLFRVTPEIPAGLPSPRSE

SEQ ID NO: 499 - protein, 174 aa, Artificial sequence
  synthetic sequence
  misc_feature (109)..(109): Xaa can be any amino acid other than serine
PAGLLDLRQGMFAQLVAQNVLLIDGPLSWYSDPGLAGVSLTGGLSYKEDTKELVVAKAGVYYVFFQLELRRVVAGEGSGSVSLALHLQPLRSAAGAAALALTVDLPPAXSEARNSAFGFQGRLLHLSAGQRLGVHLHTEARARHAWQLTQGATVLGLFRVTPEIPAGLPSPRSE

SEQ ID NO: 500 - protein, 174 aa, Artificial sequence
  synthetic sequence
  misc_feature (110)..(110): Xaa can be any amino acid other than serine
PAGLLDLRQGMFAQLVAQNVLLIDGPLSWYSDPGLAGVSLTGGLSYKEDTKELVVAKAGVYYVFFQLELRRVVAGEGSGSVSLALHLQPLRSAAGAAALALTVDLPPASXEARNSAFGFQGRLLHLSAGQRLGVHLHTEARARHAWQLTQGATVLGLFRVTPEIPAGLPSPRSE

SEQ ID NO: 501 - protein, 174 aa, Artificial sequence
  synthetic sequence
  misc_feature (111)..(111): Xaa can be any amino acid other than glutamic acid
PAGLLDLRQGMFAQLVAQNVLLIDGPLSWYSDPGLAGVSLTGGLSYKEDTKELVVAKAGVYYVFFQLELRRVVAGEGSGSVSLALHLQPLRSAAGAAALALTVDLPPASSXARNSAFGFQGRLLHLSAGQRLGVHLHTEARARHAWQLTQGATVLGLFRVTPEIPAGLPSPRSE

SEQ ID NO: 502 - protein, 174 aa, Artificial sequence
  synthetic sequence
  misc_feature (113)..(113): Xaa can be any amino acid other than arginine
PAGLLDLRQGMFAQLVAQNVLLIDGPLSWYSDPGLAGVSLTGGLSYKEDTKELVVAKAGVYYVFFQLELRRVVAGEGSGSVSLALHLQPLRSAAGAAALALTVDLPPASSEAXNSAFGFQGRLLHLSAGQRLGVHLHTEARARHAWQLTQGATVLGLFRVTPEIPAGLPSPRSE

SEQ ID NO: 503 - protein, 174 aa, Artificial sequence
  synthetic sequence
  misc_feature (114)..(114): Xaa can be any amino acid other than asparagine
PAGLLDLRQGMFAQLVAQNVLLIDGPLSWYSDPGLAGVSLTGGLSYKEDTKELVVAKAGVYYVFFQLELRRVVAGEGSGSVSLALHLQPLRSAAGAAALALTVDLPPASSEARXSAFGFQGRLLHLSAGQRLGVHLHTEARARHAWQLTQGATVLGLFRVTPEIPAGLPSPRSE

SEQ ID NO: 504 - protein, 174 aa, Artificial sequence
  synthetic sequence
  misc_feature (115)..(115): Xaa can be any amino acid other than serine
PAGLLDLRQGMFAQLVAQNVLLIDGPLSWYSDPGLAGVSLTGGLSYKEDTKELVVAKAGVYYVFFQLELRRVVAGEGSGSVSLALHLQPLRSAAGAAALALTVDLPPASSEARNXAFGFQGRLLHLSAGQRLGVHLHTEARARHAWQLTQGATVLGLFRVTPEIPAGLPSPRSE

SEQ ID NO: 505 - protein, 174 aa, Artificial sequence
  synthetic sequence
  misc_feature (117)..(117): Xaa can be any amino acid other than phenylalanine
PAGLLDLRQGMFAQLVAQNVLLIDGPLSWYSDPGLAGVSLTGGLSYKEDTKELVVAKAGVYYVFFQLELRRVVAGEGSGSVSLALHLQPLRSAAGAAALALTVDLPPASSEARNSAXGFQGRLLHLSAGQRLGVHLHTEARARHAWQLTQGATVLGLFRVTPEIPAGLPSPRSE

SEQ ID NO: 506 - protein, 174 aa, Artificial sequence
  synthetic sequence
  misc_feature (130)..(130): Xaa can be any amino acid other than glutamine
PAGLLDLRQGMFAQLVAQNVLLIDGPLSWYSDPGLAGVSLTGGLSYKEDTKELVVAKAGVYYVFFQLELRRVVAGEGSGSVSLALHLQPLRSAAGAAALALTVDLPPASSEARNSAFGFQGRLLHLSAGXRLGVHLHTEARARHAWQLTQGATVLGLFRVTPEIPAGLPSPRSE

SEQ ID NO: 507 - protein, 174 aa, Artificial sequence
  synthetic sequence
  misc_feature (131)..(131): Xaa can be any amino acid other than arginine
PAGLLDLRQGMFAQLVAQNVLLIDGPLSWYSDPGLAGVSLTGGLSYKEDTKELVVAKAGVYYVFFQLELRRVVAGEGSGSVSLALHLQPLRSAAGAAALALTVDLPPASSEARNSAFGFQGRLLHLSAGQXLGVHLHTEARARHAWQLTQGATVLGLFRVTPEIPAGLPSPRSE

SEQ ID NO: 508 - protein, 174 aa, Artificial sequence
  synthetic sequence
  misc_feature (132)..(132): Xaa can be any amino acid other than leucine
PAGLLDLRQGMFAQLVAQNVLLIDGPLSWYSDPGLAGVSLTGGLSYKEDTKELVVAKAGVYYVFFQLELRRVVAGEGSGSVSLALHLQPLRSAAGAAALALTVDLPPASSEARNSAFGFQGRLLHLSAGQRXGVHLHTEARARHAWQLTQGATVLGLFRVTPEIPAGLPSPRSE

SEQ ID NO: 509 - protein, 174 aa, Artificial sequence
  synthetic sequence
  misc_feature (133)..(133): Xaa can be any amino acid other than glycine
PAGLLDLRQGMFAQLVAQNVLLIDGPLSWYSDPGLAGVSLTGGLSYKEDTKELVVAKAGVYYVFFQLELRRVVAGEGSGSVSLALHLQPLRSAAGAAALALTVDLPPASSEARNSAFGFQGRLLHLSAGQRLXVHLHTEARARHAWQLTQGATVLGLFRVTPEIPAGLPSPRSE

SEQ ID NO: 510 - protein, 174 aa, Artificial sequence
  synthetic sequence
  misc_feature (134)..(134): Xaa can be any amino acid other than valine
PAGLLDLRQGMFAQLVAQNVLLIDGPLSWYSDPGLAGVSLTGGLSYKEDTKELVVAKAGVYYVFFQLELRRVVAGEGSGSVSLALHLQPLRSAAGAAALALTVDLPPASSEARNSAFGFQGRLLHLSAGQRLGXHLHTEARARHAWQLTQGATVLGLFRVTPEIPAGLPSPRSE

SEQ ID NO: 511 - protein, 174 aa, Artificial sequence
  synthetic sequence
  misc_feature (135)..(135): Xaa can be any amino acid other than histidine
PAGLLDLRQGMFAQLVAQNVLLIDGPLSWYSDPGLAGVSLTGGLSYKEDTKELVVAKAGVYYVFFQLELRRVVAGEGSGSVSLALHLQPLRSAAGAAALALTVDLPPASSEARNSAFGFQGRLLHLSAGQRLGVXLHTEARARHAWQLTQGATVLGLFRVTPEIPAGLPSPRSE

SEQ ID NO: 512 - protein, 174 aa, Artificial sequence
  synthetic sequence
  misc_feature (136)..(136): Xaa can be any amino acid other than leucine
PAGLLDLRQGMFAQLVAQNVLLIDGPLSWYSDPGLAGVSLTGGLSYKEDTKELVVAKAGVYYVFFQLELRRVVAGEGSGSVSLALHLQPLRSAAGAAALALTVDLPPASSEARNSAFGFQGRLLHLSAGQRLGVHXHTEARARHAWQLTQGATVLGLFRVTPEIPAGLPSPRSE

SEQ ID NO: 513 - protein, 174 aa, Artificial sequence
  synthetic sequence
  misc_feature (137)..(137): Xaa can be any amino acid other than histidine
PAGLLDLRQGMFAQLVAQNVLLIDGPLSWYSDPGLAGVSLTGGLSYKEDTKELVVAKAGVYYVFFQLELRRVVAGEGSGSVSLALHLQPLRSAAGAAALALTVDLPPASSEARNSAFGFQGRLLHLSAGQRLGVHLXTEARARHAWQLTQGATVLGLFRVTPEIPAGLPSPRSE

SEQ ID NO: 514 - protein, 174 aa, Artificial sequence
  synthetic sequence
  misc_feature (138)..(138): Xaa can be any amino acid other than threonine
PAGLLDLRQGMFAQLVAQNVLLIDGPLSWYSDPGLAGVSLTGGLSYKEDTKELVVAKAGVYYVFFQLELRRVVAGEGSGSVSLALHLQPLRSAAGAAALALTVDLPPASSEARNSAFGFQGRLLHLSAGQRLGVHLHXEARARHAWQLTQGATVLGLFRVTPEIPAGLPSPRSE

SEQ ID NO: 515 - protein, 174 aa, Artificial sequence
  synthetic sequence
  misc_feature (139)..(139): Xaa can be any amino acid other than glutamic acid
PAGLLDLRQGMFAQLVAQNVLLIDGPLSWYSDPGLAGVSLTGGLSYKEDTKELVVAKAGVYYVFFQLELRRVVAGEGSGSVSLALHLQPLRSAAGAAALALTVDLPPASSEARNSAFGFQGRLLHLSAGQRLGVHLHTXARARHAWQLTQGATVLGLFRVTPEIPAGLPSPRSE

SEQ ID NO: 516 - protein, 174 aa, Artificial sequence
  synthetic sequence
  misc_feature (141)..(141): Xaa can be any amino acid other than arginine
PAGLLDLRQGMFAQLVAQNVLLIDGPLSWYSDPGLAGVSLTGGLSYKEDTKELVVAKAGVYYVFFQLELRRVVAGEGSGSVSLALHLQPLRSAAGAAALALTVDLPPASSEARNSAFGFQGRLLHLSAGQRLGVHLHTEAXARHAWQLTQGATVLGLFRVTPEIPAGLPSPRSE

SEQ ID NO: 517 - protein, 174 aa, Artificial sequence
  synthetic sequence
  misc_feature (143)..(143): Xaa can be any amino acid other than arginine
PAGLLDLRQGMFAQLVAQNVLLIDGPLSWYSDPGLAGVSLTGGLSYKEDTKELVVAKAGVYYVFFQLELRRVVAGEGSGSVSLALHLQPLRSAAGAAALALTVDLPPASSEARNSAFGFQGRLLHLSAGQRLGVHLHTEARAXHAWQLTQGATVLGLFRVTPEIPAGLPSPRSE

SEQ ID NO: 518 - protein, 174 aa, Artificial sequence
  synthetic sequence
  misc_feature (144)..(144): Xaa can be any amino acid other than histidine
PAGLLDLRQGMFAQLVAQNVLLIDGPLSWYSDPGLAGVSLTGGLSYKEDTKELVVAKAGVYYVFFQLELRRVVAGEGSGSVSLALHLQPLRSAAGAAALALTVDLPPASSEARNSAFGFQGRLLHLSAGQRLGVHLHTEARARXAWQLTQGATVLGLFRVTPEIPAGLPSPRSE

SEQ ID NO: 519 - protein, 174 aa, Artificial sequence
  synthetic sequence
  misc_feature (146)..(146): Xaa can be any amino acid other than tryptophan
PAGLLDLRQGMFAQLVAQNVLLIDGPLSWYSDPGLAGVSLTGGLSYKEDTKELVVAKAGVYYVFFQLELRRVVAGEGSGSVSLALHLQPLRSAAGAAALALTVDLPPASSEARNSAFGFQGRLLHLSAGQRLGVHLHTEARARHAXQLTQGATVLGLFRVTPEIPAGLPSPRSE

SEQ ID NO: 520 - protein, 174 aa, Artificial sequence
  synthetic sequence
  misc_feature (148)..(148): Xaa can be any amino acid other than leucine
PAGLLDLRQGMFAQLVAQNVLLIDGPLSWYSDPGLAGVSLTGGLSYKEDTKELVVAKAGVYYVFFQLELRRVVAGEGSGSVSLALHLQPLRSAAGAAALALTVDLPPASSEARNSAFGFQGRLLHLSAGQRLGVHLHTEARARHAWQXTQGATVLGLFRVTPEIPAGLPSPRSE

SEQ ID NO: 521 - protein, 174 aa, Artificial sequence
  synthetic sequence
  misc_feature (149)..(149): Xaa can be any amino acid other than threonine
PAGLLDLRQGMFAQLVAQNVLLIDGPLSWYSDPGLAGVSLTGGLSYKEDTKELVVAKAGVYYVFFQLELRRVVAGEGSGSVSLALHLQPLRSAAGAAALALTVDLPPASSEARNSAFGFQGRLLHLSAGQRLGVHLHTEARARHAWQLXQGATVLGLFRVTPEIPAGLPSPRSE

SEQ ID NO: 522 - protein, 174 aa, Artificial sequence
  synthetic sequence
  misc_feature (150)..(150): Xaa can be any amino acid other than glutamine
PAGLLDLRQGMFAQLVAQNVLLIDGPLSWYSDPGLAGVSLTGGLSYKEDTKELVVAKAGVYYVFFQLELRRVVAGEGSGSVSLALHLQPLRSAAGAAALALTVDLPPASSEARNSAFGFQGRLLHLSAGQRLGVHLHTEARARHAWQLTXGATVLGLFRVTPEIPAGLPSPRSE

SEQ ID NO: 523 - protein, 174 aa, Artificial sequence
  synthetic sequence
  misc_feature (151)..(151): Xaa can be any amino acid other than glycine
PAGLLDLRQGMFAQLVAQNVLLIDGPLSWYSDPGLAGVSLTGGLSYKEDTKELVVAKAGVYYVFFQLELRRVVAGEGSGSVSLALHLQPLRSAAGAAALALTVDLPPASSEARNSAFGFQGRLLHLSAGQRLGVHLHTEARARHAWQLTQXATVLGLFRVTPEIPAGLPSPRSE

SEQ ID NO: 524 - protein, 174 aa, Artificial sequence
  synthetic sequence
  misc_feature (153)..(153): Xaa can be any amino acid other than threonine
PAGLLDLRQGMFAQLVAQNVLLIDGPLSWYSDPGLAGVSLTGGLSYKEDTKELVVAKAGVYYVFFQLELRRVVAGEGSGSVSLALHLQPLRSAAGAAALALTVDLPPASSEARNSAFGFQGRLLHLSAGQRLGVHLHTEARARHAWQLTQGAXVLGLFRVTPEIPAGLPSPRSE

SEQ ID NO: 525 - protein, 174 aa, Artificial sequence
  synthetic sequence
  misc_feature (154)..(154): Xaa can be any amino acid other than valine
PAGLLDLRQGMFAQLVAQNVLLIDGPLSWYSDPGLAGVSLTGGLSYKEDTKELVVAKAGVYYVFFQLELRRVVAGEGSGSVSLALHLQPLRSAAGAAALALTVDLPPASSEARNSAFGFQGRLLHLSAGQRLGVHLHTEARARHAWQLTQGATXLGLFRVTPEIPAGLPSPRSE

SEQ ID NO: 526 - protein, 10 aa, Artificial sequence
  synthetic sequence
KLLGPHVEGL

SEQ ID NO: 527 - protein, 133 aa, Artificial sequence
  synthetic sequence
  misc_feature (42)..(42): Xaa can be any amino acid other than phenylalanine
APTSSSTKKTQLQLEHLLLDLQMILNGINNYKNPKLTRMLTXKFYMPKKATELKHLQCLEEELKPLEEVLNLAQSKNFHLRPRDLISNINVIVLELKGSETTFMCEYADETATIVEFLNRWITFCQSIISTLT

SEQ ID NO: 528 - protein, 133 aa, Artificial sequence
  synthetic sequence
  misc_feature (20)..(20): Xaa can be any amino acid other than aspartic acid
APTSSSTKKTQLQLEHLLLXLQMILNGINNYKNPKLTRMLTFKFYMPKKATELKHLQCLEEELKPLEEVLNLAQSKNFHLRPRDLISNINVIVLELKGSETTFMCEYADETATIVEFLNRWITFCQSIISTLT

SEQ ID NO: 529 - protein, 133 aa, Artificial sequence
  synthetic sequence
  misc_feature (15)..(15): Xaa can be any amino acid other than glutamic acid
APTSSSTKKTQLQLXHLLLDLQMILNGINNYKNPKLTRMLTFKFYMPKKATELKHLQCLEEELKPLEEVLNLAQSKNFHLRPRDLISNINVIVLELKGSETTFMCEYADETATIVEFLNRWITFCQSIISTLT

SEQ ID NO: 530 - protein, 133 aa, Artificial sequence
  synthetic sequence
  misc_feature (16)..(16): Xaa can be any amino acid other than histidine
APTSSSTKKTQLQLEXLLLDLQMILNGINNYKNPKLTRMLTFKFYMPKKATELKHLQCLEEELKPLEEVLNLAQSKNFHLRPRDLISNINVIVLELKGSETTFMCEYADETATIVEFLNRWITFCQSIISTLT

SEQ ID NO: 531 - protein, 133 aa, Artificial sequence; identical to SEQ ID NO: 530
  synthetic sequence
  misc_feature (16)..(16): Xaa can be any amino acid other than histidine

SEQ ID NO: 532 - protein, 133 aa, Artificial sequence
  synthetic sequence
  misc_feature (45)..(45): Xaa can be any amino acid other than tyrosine
APTSSSTKKTQLQLEHLLLDLQMILNGINNYKNPKLTRMLTFKFXMPKKATELKHLQCLEEELKPLEEVLNLAQSKNFHLRPRDLISNINVIVLELKGSETTFMCEYADETATIVEFLNRWITFCQSIISTLT

SEQ ID NO: 533 - protein, 133 aa, Artificial sequence
  synthetic sequence
  misc_feature (126)..(126): Xaa can be any amino acid other than glutamine
APTSSSTKKTQLQLEHLLLDLQMILNGINNYKNPKLTRMLTFKFYMPKKATELKHLQCLEEELKPLEEVLNLAQSKNFHLRPRDLISNINVIVLELKGSETTFMCEYADETATIVEFLNRWITFCXSIISTLT

SEQ ID NO: 534 - protein, 133 aa, Artificial sequence
  synthetic sequence
  misc_feature (16)..(16): Xaa can be any amino acid other than histidine
  misc_feature (42)..(42): Xaa can be any amino acid other than phenylalanine
APTSSSTKKTQLQLEXLLLDLQMILNGINNYKNPKLTRMLTXKFYMPKKATELKHLQCLEEELKPLEEVLNLAQSKNFHLRPRDLISNINVIVLELKGSETTFMCEYADETATIVEFLNRWITFCQSIISTLT

SEQ ID NO: 535 - protein, 133 aa, Artificial sequence
  synthetic sequence
  misc_feature (20)..(20): Xaa can be any amino acid other than aspartic acid
  misc_feature (42)..(42): Xaa can be any amino acid other than phenylalanine
APTSSSTKKTQLQLEHLLLXLQMILNGINNYKNPKLTRMLTXKFYMPKKATELKHLQCLEEELKPLEEVLNLAQSKNFHLRPRDLISNINVIVLELKGSETTFMCEYADETATIVEFLNRWITFCQSIISTLT

SEQ ID NO: 536 - protein, 133 aa, Artificial sequence
  synthetic sequence
  misc_feature (15)..(15): Xaa can be any amino acid other than glutamic acid
  misc_feature (20)..(20): Xaa can be any amino acid other than aspartic acid
  misc_feature (42)..(42): Xaa can be any amino acid other than phenylalanine
APTSSSTKKTQLQLXHLLLXLQMILNGINNYKNPKLTRMLTXKFYMPKKATELKHLQCLEEELKPLEEVLNLAQSKNFHLRPRDLISNINVIVLELKGSETTFMCEYADETATIVEFLNRWITFCQSIISTLT

SEQ ID NO: 537 - protein, 133 aa, Artificial sequence
  synthetic sequence
  misc_feature (16)..(16): Xaa can be any amino acid other than histidine
  misc_feature (20)..(20): Xaa can be any amino acid other than aspartic acid
  misc_feature (42)..(42): Xaa can be any amino acid other than phenylalanine
APTSSSTKKTQLQLEXLLLXLQMILNGINNYKNPKLTRMLTXKFYMPKKATELKHLQCLEEELKPLEEVLNLAQSKNFHLRPRDLISNINVIVLELKGSETTFMCEYADETATIVEFLNRWITFCQSIISTLT

SEQ ID NO: 538 - protein, 133 aa, Artificial sequence
  synthetic sequence
  misc_feature (20)..(20): Xaa can be any amino acid other than aspartic acid
  misc_feature (42)..(42): Xaa can be any amino acid other than phenylalanine
  misc_feature (126)..(126): Xaa can be any amino acid other than glutamine
APTSSSTKKTQLQLEHLLLXLQMILNGINNYKNPKLTRMLTXKFYMPKKATELKHLQCLEEELKPLEEVLNLAQSKNFHLRPRDLISNINVIVLELKGSETTFMCEYADETATIVEFLNRWITFCXSIISTLT

SEQ ID NO: 539 - protein, 133 aa, Artificial sequence
  synthetic sequence
  misc_feature (20)..(20): Xaa can be any amino acid other than aspartic acid
  misc_feature (42)..(42): Xaa can be any amino acid other than phenylalanine
  misc_feature (45)..(45): Xaa can be any amino acid other than tyrosine
APTSSSTKKTQLQLEHLLLXLQMILNGINNYKNPKLTRMLTXKFXMPKKATELKHLQCLEEELKPLEEVLNLAQSKNFHLRPRDLISNINVIVLELKGSETTFMCEYADETATIVEFLNRWITFCQSIISTLT

SEQ ID NO: 540 - protein, 133 aa, Artificial sequence
  synthetic sequence
  misc_feature (16)..(16): Xaa can be any amino acid other than histidine
  misc_feature (20)..(20): Xaa can be any amino acid other than aspartic acid
  misc_feature (42)..(42): Xaa can be any amino acid other than phenylalanine
  misc_feature (45)..(45): Xaa can be any amino acid other than tyrosine
APTSSSTKKTQLQLEXLLLXLQMILNGINNYKNPKLTRMLTXKFXMPKKATELKHLQCLEEELKPLEEVLNLAQSKNFHLRPRDLISNINVIVLELKGSETTFMCEYADETATIVEFLNRWITFCQSIISTLT

SEQ ID NO: 541 - protein, 133 aa, Artificial sequence
  synthetic sequence
  misc_feature (20)..(20): Xaa can be any amino acid other than aspartic acid
  misc_feature (42)..(42): Xaa can be any amino acid other than phenylalanine
  misc_feature (45)..(45): Xaa can be any amino acid other than tyrosine
  misc_feature (126)..(126): Xaa can be any amino acid other than glutamine
APTSSSTKKTQLQLEHLLLXLQMILNGINNYKNPKLTRMLTXKFXMPKKATELKHLQCLEEELKPLEEVLNLAQSKNFHLRPRDLISNINVIVLELKGSETTFMCEYADETATIVEFLNRWITFCXSIISTLT

SEQ ID NO: 542 - protein, 133 aa, Artificial sequence
  synthetic sequence
  misc_feature (16)..(16): Xaa can be any amino acid other than histidine
  misc_feature (20)..(20): Xaa can be any amino acid other than aspartic acid
  misc_feature (42)..(42): Xaa can be any amino acid other than phenylalanine
  misc_feature (45)..(45): Xaa can be any amino acid other than tyrosine
  misc_feature (126)..(126): Xaa can be any amino acid other than glutamine
APTSSSTKKTQLQLEXLLLXLQMILNGINNYKNPKLTRMLTXKFXMPKKATELKHLQCLEEELKPLEEVLNLAQSKNFHLRPRDLISNINVIVLELKGSETTFMCEYADETATIVEFLNRWITFCXSIISTLT

SEQ ID NO: 543 - protein, 133 aa, Artificial sequence
  synthetic sequence
  misc_feature (16)..(16): Xaa can be any amino acid other than histidine
  misc_feature (42)..(42): Xaa can be any amino acid other than phenylalanine
  misc_feature (126)..(126): Xaa can be any amino acid other than glutamine
APTSSSTKKTQLQLEXLLLDLQMILNGINNYKNPKLTRMLTXKFYMPKKATELKHLQCLEEELKPLEEVLNLAQSKNFHLRPRDLISNINVIVLELKGSETTFMCEYADETATIVEFLNRWITFCXSIISTLT

SEQ ID NO: 544 - protein, 9 aa, Artificial sequence
  synthetic sequence
YPYDVPDYA

SEQ ID NO: 545 - protein, 8 aa, Artificial sequence
  synthetic sequence
DYKDDDDK

SEQ ID NO: 546 - protein, 10 aa, Artificial sequence
  synthetic sequence
EQKLISEEDL

SEQ ID NO: 547 - protein, 5 aa, Artificial sequence
  synthetic sequence
HHHHH

SEQ ID NO: 548 - protein, 6 aa, Artificial sequence
  synthetic sequence
HHHHHH

SEQ ID NO: 549 - protein, 10 aa, Artificial sequence
  synthetic sequence
EQKLISEEDL

SEQ ID NO: 550 - protein, 8 aa, Artificial sequence
  synthetic sequence
DYKDDDDK

SEQ ID NO: 551 - protein, 8 aa, Artificial sequence
  synthetic sequence
WSHPQFEK

SEQ ID NO: 552 - protein, 9 aa, Artificial sequence
  synthetic sequence
YPYDVPDYA

SEQ ID NO: 553 - protein, 5 aa, Artificial sequence
  synthetic sequence
RYIRS

SEQ ID NO: 554 - protein, 4 aa, Artificial sequence
  synthetic sequence
FHHT

SEQ ID NO: 555 - protein, 17 aa, Artificial sequence
  synthetic sequence
WEAAAREACCRECCARA

SEQ ID NO: 556 - protein, 8 aa, Artificial sequence
  synthetic sequence
LEVLFQGP

SEQ ID NO: 557 - protein, 7 aa, Artificial sequence
  synthetic sequence
ENLYTQS

SEQ ID NO: 558 - protein, 5 aa, Artificial sequence
  synthetic sequence
DDDDK

SEQ ID NO: 559 - protein, 4 aa, Artificial sequence
  synthetic sequence
LVPR

SEQ ID NO: 560 - protein, 22 aa, Artificial sequence
  synthetic sequence
GSGATNFSLLKQAGDVEENPGP

SEQ ID NO: 561 - protein, 8 aa, Artificial sequence
  synthetic sequence
  misc_feature (1)..(8): Xaa can be any naturally occurring amino acid
XXXXXXXX

SEQ ID NO: 562 - protein, 8 aa, Artificial sequence
  synthetic sequence
  misc_feature (1)..(8): Xaa can be any naturally occurring amino acid
XXXXXXXX

SEQ ID NO: 563 - protein, 8 aa, Artificial sequence
  synthetic sequence
  misc_feature (1)..(8): Xaa can be any naturally occurring amino acid
XXXXXXXX

SEQ ID NO: 564 - protein, 8 aa, Artificial sequence
  synthetic sequence
  misc_feature (1)..(8): Xaa can be any naturally occurring amino acid
XXXXXXXX

SEQ ID NO: 565 - protein, 8 aa, Artificial sequence
  synthetic sequence
  misc_feature (1)..(8): Xaa can be any naturally occurring amino acid
XXXXXXXX

SEQ ID NO: 566 - protein, 8 aa, Artificial sequence
  synthetic sequence
  misc_feature (1)..(8): Xaa can be any naturally occurring amino acid
XXXXXXXX

SEQ ID NO: 567 - protein, 8 aa, Artificial sequence
  synthetic sequence
  misc_feature (1)..(8): Xaa can be any naturally occurring amino acid
XXXXXXXX

SEQ ID NO: 568 - protein, 8 aa, Artificial sequence
  synthetic sequence
  misc_feature (1)..(8): Xaa can be any naturally occurring amino acid
XXXXXXXX

SEQ ID NO: 569 - protein, 8 aa, Artificial sequence
  synthetic sequence
  misc_feature (1)..(8): Xaa can be any naturally occurring amino acid
XXXXXXXX

SEQ ID NO: 570 - protein, 14 aa, Artificial sequence
  synthetic sequence
ARDSYYDNSYVRDY

SEQ ID NO: 571 - protein, 8 aa, Artificial sequence
  synthetic sequence
  misc_feature (1)..(8): Xaa can be any naturally occurring amino acid
XXXXXXXX

SEQ ID NO: 572 - protein, 8 aa, Artificial sequence
  synthetic sequence
  misc_feature (1)..(8): Xaa can be any naturally occurring amino acid
XXXXXXXX

SEQ ID NO: 573 - protein, 1255 aa, Homo sapiens
MTPGTQSPFFLLLLLTVLTVVTGSGHASSTPGGEKETSATQRSSVPSSTEKNAVSMTSSVLSSHSPGSGSSTTQGQDVTLAPATEPASGSAATWGQDVTSVPVTRPALGSTTPPAHDVTSAPDNKPAPGSTAPPAHGVTSAPDTRPAPGSTAPPAHGVTSAPDTRPAPGSTAPPAHGVTSAPDTRPAPGSTAPPAHGVTSAPDTRPAPGSTAPPAHGVTSAPDTRPAPGSTAPPAHGVTSAPDTRPAPGSTAPPAHGVTSAPDTRPAPGSTAPPAHGVTSAPDTRPAPGSTAPPAHGVTSAPDTRPAPGSTAPPAHGVTSAPDTRPAPGSTAPPAHGVTSAPDTRPAPGSTAPPAHGVTSAPDTRPAPGSTAPPAHGVTSAPDTRPAPGSTAPPAHGVTSAPDTRPAPGSTAPPAHGVTSAPDTRPAPGSTAPPAHGVTSAPDTRPAPGSTAPPAHGVTSAPDTRPAPGSTAPPAHGVTSAPDTRPAPGSTAPPAHGVTSAPDTRPAPGSTAPPAHGVTSAPDTRPAPGSTAPPAHGVTSAPDTRPAPGSTAPPAHGVTSAPDTRPAPGSTAPPAHGVTSAPDTRPAPGSTAPPAHGVTSAPDTRPAPGSTAPPAHGVTSAPDTRPAPGSTAPPAHGVTSAPDTRPAPGSTAPPAHGVTSAPDTRPAPGSTAPPAHGVTSAPDTRPAPGSTAPPAHGVTSAPDTRPAPGSTAPPAHGVTSAPDTRPAPGSTAPPAHGVTSAPDTRPAPGSTAPPAHGVTSAPDTRPAPGSTAPPAHGVTSAPDTRPAPGSTAPPAHGVTSAPDTRPAPGSTAPPAHGVTSAPDTRPAPGSTAPPAHGVTSAPDTRPAPGSTAPPAHGVTSAPDTRPAPGSTAPPAHGVTSAPDTRPAPGSTAPPAHGVTSAPDTRPAPGSTAPPAHGVTSAPDTRPAPGSTAPPAHGVTSAPDNRPALGSTAPPVHNVTSASGSASGSASTLVHNGTSARATTTPASKSTPFSIPSHHSDTPTTLASHSTKTDASSTHHSSVPPLTSSNHSTSPQLSTGVSFFFLSFHISNLQFNSSLEDPSTDYYQELQRDISEMFLQIYKQGGFLGLSNIKFRPGSVVVQLTLAFREGTINVHDVETQFNQYKTEAASRYNLTISDVSVSDVPFPFSAQSGAGVPGWGIALLVLVCVLVALAIVYLIALAVCQCRRKNYGQLDIFPARDTYHPMSEYPTYHTHGRYVPPSSTDRSPYEKVSAGNGGSSLSYTNPAVAATSANL

SEQ ID NO: 574 - protein, 264 aa, Homo sapiens
MTPGTQSPFFLLLLLTVLTATTAPKPATVVTGSGHASSTPGGEKETSATQRSSVPSSTEKNAFNSSLEDPSTDYYQELQRDISEMFLQIYKQGGFLGLSNIKFRPGSVVVQLTLAFREGTINVHDVETQFNQYKTEAASRYNLTISDVSVSDVPFPFSAQSGAGVPGWGIALLVLVCVLVALAIVYLIALAVCQCRRKNYGQLDIFPARDTYHPMSEYPTYHTHGRYVPPSSTDRSPYEKVSAGNGGSSLSYTNPAVAATSANL

SEQ ID NO: 575 - protein, 255 aa, Homo sapiens
MTPGTQSPFFLLLLLTVLTVVTGSGHASSTPGGEKETSATQRSSVPSSTEKNAFNSSLEDPSTDYYQELQRDISEMFLQIYKQGGFLGLSNIKFRPGSVVVQLTLAFREGTINVHDVETQFNQYKTEAASRYNLTISDVSVSDVPFPFSAQSGAGVPGWGIALLVLVCVLVALAIVYLIALAVCQCRRKNYGQLDIFPARDTYHPMSEYPTYHTHGRYVPPSSTDRSPYEKVSAGNGGSSLSYTNPAVAATSANL

SEQ ID NO: 576 - protein, 203 aa, Homo sapiens
MTPGTQSPFFLLLLLTVLTVVTGSGHASSTPGGEKETSATQRSSVPSSTEKNAIPAPTTTKSCRETFLKCFCRFINKGVFWASPILSSVSDVPFPFSAQSGAGVPGWGIALLVLVCVLVALAIVYLIALAVCQCRRKNYGQLDIFPARDTYHPMSEYPTYHTHGRYVPPSSTDRSPYEKVSAGNGGSSLSYTNPAVAATSANL

SEQ ID NO: 577 - protein, 150 aa, Homo sapiens
MTPGTQSPFFLLLLLTVLTVVTGSGHASSTPGGEKETSATQRSSVPSSTEKNAFNSSLEDPSTDYYQELQRDISEMAVCQCRRKNYGQLDIFPARDTYHPMSEYPTYHTHGRYVPPSSTDRSPYEKVSAGNGGSSLSYTNPAVAATSANL

SEQ ID NO: 578 - protein, 159 aa, Homo sapiens
MTPGTQSPFFLLLLLTVLTATTAPKPATVVTGSGHASSTPGGEKETSATQRSSVPSSTEKNAFNSSLEDPSTDYYQELQRDISEMAVCQCRRKNYGQLDIFPARDTYHPMSEYPTYHTHGRYVPPSSTDRSPYEKVSAGNGGSSLSYTNPAVAATSANL

SEQ ID NO: 579 - protein, 158 aa, Homo sapiens
MTPGTQSPFFLLLLLTVLTVVTGSGHASSTPGGEKETSATQRSSVPSSTEKNAIPAPTTTKSCRETFLKCFCRFINKGVFWASPILSSVWGWGARLGHRAAGAGLCSGCAGHCLSHCLGCLSVPPKELRAAGHLSSPGYLPSYERVPHLPHPWALCAP

SEQ ID NO: 580 - protein, 475 aa, Homo sapiens
MTPGTQSPFFLLLLLTVLTVVTGSGHASSTPGGEKETSATQRSSVPSSTEKNAVSMTSSVLSSHSPGSGSSTTQGQDVTLAPATEPASGSAATWGQDVTSVPVTRPALGSTTPPAHDVTSAPDNKPAPGSTAPPAHGVTSAPDTRPAPGSTAPPAHGVTSAPDNRPALGSTAPPVHNVTSASGSASGSASTLVHNGTSARATTTPASKSTPFSIPSHHSDTPTTLASHSTKTDASSTHHSTVPPLTSSNHSTSPQLSTGVSFFFLSFHISNLQFNSSLEDPSTDYYQELQRDISEMFLQIYKQGGFLGLSNIKFRPGSVVVQLTLAFREGTINVHDVETQFNQYKTEAASRYNLTISDVSVSDVPFPFSAQSGAGVPGWGIALLVLVCVLVALAIVYLIALAVCQCRRKNYGQLDIFPARDTYHPMSEYPTYHTHGRYVPPSSTDRSPYEKVSAGNGGSSLSYTNPAVAATSANL

SEQ ID NO: 581 - protein, 282 aa, Homo sapiens
MTPGTQSPFFLLLLLTVLTATTAPKPATVVTGSGHASSTPGGEKETSATQRSSVPSSTEKNALSTGVSFFFLSFHISNLQFNSSLEDPSTDYYQELQRDISEMFLQIYKQGGFLGLSNIKFRPGSVVVQLTLAFREGTINVHDVETQFNQYKTEAASRYNLTISDVSVSDVPFPFSAQSGAGVPGWGIALLVLVCVLVALAIVYLIALAVCQCRRKNYGQLDIFPARDTYHPMSEYPTYHTHGRYVPPSSTDRSPYEKVSAGNGGSSLSYTNPAVAATSANL

SEQ ID NO: 582 - protein, 219 aa, Homo sapiens
MTPGTQSPFFLLLLLTVLTATTAPKPATVVTGSGHASSTPGGEKETSATQRSSVPSSTEKNAFNSSLEDPSTDYYQELQRDISEMFLQIYKQGGFLGLSNIKFRPGSVVVQLTLAFREGTINVHDVETQFNQYKTEAASRYNLTISDVSVWGWGARLGHRAAGAGLCSGCAGHCLSHCLGCLSVPPKELRAAGHLSSPGYLPSYERVPHLPHPWALCAP

SEQ ID NO: 583 - protein, 238 aa, Homo sapiens
MTPGTQSPFFLLLLLTVLTATTAPKPATVVTGSGHASSTPGGEKETSATQRSSVPSSTEKNAIYKQGGFLGLSNIKFRPGSVVVQLTLAFREGTINVHDVETQFNQYKTEAASRYNLTISDVSVSDVPFPFSAQSGAGVPGWGIALLVLVCVLVALAIVYLIALAVCQCRRKNYGQLDIFPARDTYHPMSEYPTYHTHGRYVPPSSTDRSPYEKVSAGNGGSSLSYTNPAVAATSANL

SEQ ID NO: 584 - protein, 217 aa, Homo sapiens
MTPGTQSPFFLLLLLTVLTGGEKETSATQRSSVPSSTEKNAIYKQGGFLGLSNIKFRPGSVVVQLTLAFREGTINVHDVETQFNQYKTEAASRYNLTISDVSVSDVPFPFSAQSGAGVPGWGIALLVLVCVLVALAIVYLIALAVCQCRRKNYGQLDIFPARDTYHPMSEYPTYHTHGRYVPPSSTDRSPYEKVSAGNGGSSLSYTNPAVAATSANL

SEQ ID NO: 585 - protein, 241 aa, Homo sapiens
MTPGTQSPFFLLLLLTVLTATTAPKPATVVTGSGHASSTPGGEKETSATQRSSVPSSTEKNAFLQIYKQGGFLGLSNIKFRPGSVVVQLTLAFREGTINVHDVETQFNQYKTEAASRYNLTISDVSVSDVPFPFSAQSGAGVPGWGIALLVLVCVLVALAIVYLIALAVCQCRRKNYGQLDIFPARDTYHPMSEYPTYHTHGRYVPPSSTDRSPYEKVSAGNGGSSLSYTNPAVAATSANL

SEQ ID NO: 586 - protein, 9 aa, Artificial sequence
  synthetic sequence
STAPPAHGV

SEQ ID NO: 587 - protein, 9 aa, Artificial sequence
  synthetic sequence
STAPPVHNV

SEQ ID NO: 588 - protein, 9 aa, Artificial sequence
  synthetic sequence
SLAPPVHNV

SEQ ID NO: 589 - protein, 9 aa, Artificial sequence
  synthetic sequence
SLAPPAHGV

SEQ ID NO: 590 - protein, 9 aa, Artificial sequence
  synthetic sequence
SAPDTRPAP

SEQ ID NO: 591 - protein, 20 aa, Artificial sequence
  synthetic sequence
VTSAPDTRPAPGSTAPPAHG

SEQ ID NO: 592 - protein, 20 aa, Artificial sequence
  synthetic sequence
PDTRPAPGSTAPPAHGVTSA

SEQ ID NO: 593 - protein, 9 aa, Artificial sequence
  synthetic sequence
LLLLTVLTV

SEQ ID NO: 594 - protein, 812 aa, Artificial sequence
  synthetic sequence
APTSSSTKKTQLQLEALLLDLQMILNGINNYKNPKLTRMLTAKFYMPKKATELKHLQCLEEELKPLEEVLNLAQSKNFHLRPRDLISNINVIVLELKGSETTFMCEYADETATIVEFLNRWITFCQSIISTLTGGGGSGGGGSGGGGSGGGGSAPTSSSTKKTQLQLEALLLDLQMILNGINNYKNPKLTRMLTAKFYMPKKATELKHLQCLEEELKPLEEVLNLAQSKNFHLRPRDLISNINVIVLELKGSETTFMCEYADETATIVEFLNRWITFCQSIISTLTGGGGSGGGGSGGGGSGGGGSGSHSMRYFFTSVSRPGRGEPRFIAVGYVDDTQFVRFDSDAASQRMEPRAPWIEQEGPEYWDGETRKVKAHSQTHRVDLGTLRGAYNQSEAGSHTVQRMYGCDVGSDWRFLRGYHQYAYDGKDYIALKEDLRSWTAADMAAQTTKHKWEAAHVAEQLRAYLEGTCVEWLRRYLENGKETLQRTDAPKTHMTHHAVSDHEATLRCWALSFYPAEITLTWQRDGEDQTQDTELVETRPCGDGTFQKWAAVVVPSGQEQRYTCHVQHEGLPKPLTLRWEAAAGGDKTHTCPPCPAPEAAGGPSVFLFPPKPKDTLMISRTPEVTCVVVDVSHEDPEVKFNWYVDGVEVHNAKTKPREEQYNSTYRVVSVLTVLHQDWLNGKEYKCKVSNKALPAPIEKTISKAKGQPREPQVYTLPPSREEMTKNQVSLTCLVKGFYPSDIAVEWESNGQPENNYKTTPPVLDSDGSFFLYSKLTVDKSRWQQGNVFSCSVMHEALHNHYTQKSLSLSPG

SEQ ID NO: 595 - protein, 812 aa, Artificial sequence
  synthetic sequence
APTSSSTKKTQLQLEALLLDLQMILNGINNYKNPKLTRMLTAKFYMPKKATELKHLQCLEEELKPLEEVLNLAQSKNFHLRPRDLISNINVIVLELKGSETTFMCEYADETATIVEFLNRWITFCQSIISTLTGGGGSGGGGSGGGGSGGGGSAPTSSSTKKTQLQLEALLLDLQMILNGINNYKNPKLTRMLTAKFYMPKKATELKHLQCLEEELKPLEEVLNLAQSKNFHLRPRDLISNINVIVLELKGSETTFMCEYADETATIVEFLNRWITFCQSIISTLTGGGGSGGGGSGGGGSGGGGSGSHSMRYFFTSVSRPGRGEPRFIAVGYVDDTQFVRFDSDAASQRMEPRAPWIEQEGPEYWDGETRKVKAHSQTHRVDLGTLRGCYNQSEAGSHTVQRMYGCDVGSDWRFLRGYHQYAYDGKDYIALKEDLRSWTAADMAAQTTKHKWEAAHVAEQLRAYLEGTCVEWLRRYLENGKETLQRTDAPKTHMTHHAVSDHEATLRCWALSFYPAEITLTWQRDGEDQTQDTELVETRPCGDGTFQKWAAVVVPSGQEQRYTCHVQHEGLPKPLTLRWEAAAGGDKTHTCPPCPAPEAAGGPSVFLFPPKPKDTLMISRTPEVTCVVVDVSHEDPEVKFNWYVDGVEVHNAKTKPREEQYNSTYRVVSVLTVLHQDWLNGKEYKCKVSNKALPAPIEKTISKAKGQPREPQVYTLPPSREEMTKNQVSLTCLVKGFYPSDIAVEWESNGQPENNYKTTPPVLDSDGSFFLYSKLTVDKSRWQQGNVFSCSVMHEALHNHYTQKSLSLSPG

SEQ ID NO: 596 - protein, 123 aa, Artificial sequence
  synthetic sequence
STAPPVHNVGGGGSGGGGSGGGGSIQRTPKIQVYSCHPAENGKSNFLNCYVSGFHPSDIEVDLLKNGERIEKVEHSDLSFSKDWSFYLLYYTEFTPTEKDEYACRVNHVTLSQPKIVKWDRDM

SEQ ID NO: 597 - protein, 123 aa, Artificial sequence
  synthetic sequence
STAPPVHNVGCGGSGGGGSGGGGSIQRTPKIQVYSCHPAENGKSNFLNCYVSGFHPSDIEVDLLKNGERIEKVEHSDLSFSKDWSFYLLYYTEFTPTEKDEYACRVNHVTLSQPKIVKWDRDM

SEQ ID NO: 598 - protein, 123 aa, Artificial sequence
  synthetic sequence
STAPPVHNVGCGGSGGGGSGGGGSIQRTPKIQVYSRHPAENGKSNFLNCYVSGFHPSDIEVDLLKNGERIEKVEHSDLSFSKDWSFYLLYYTEFTPTEKDEYACRVNHVTLSQPKIVKWDRDM

SEQ ID NO: 599 - protein, 123 aa, Artificial sequence
  synthetic sequence
SLAPPVHNVGGGGSGGGGSGGGGSIQRTPKIQVYSCHPAENGKSNFLNCYVSGFHPSDIEVDLLKNGERIEKVEHSDLSFSKDWSFYLLYYTEFTPTEKDEYACRVNHVTLSQPKIVKWDRDM

SEQ ID NO: 600 - protein, 123 aa, Artificial sequence
  synthetic sequence
SLAPPVHNVGCGGSGGGGSGGGGSIQRTPKIQVYSCHPAENGKSNFLNCYVSGFHPSDIEVDLLKNGERIEKVEHSDLSFSKDWSFYLLYYTEFTPTEKDEYACRVNHVTLSQPKIVKWDRDM

SEQ ID NO: 601 - protein, 123 aa, Artificial sequence
  synthetic sequence
SLAPPVHNVGCGGSGGGGSGGGGSIQRTPKIQVYSRHPAENGKSNFLNCYVSGFHPSDIEVDLLKNGERIEKVEHSDLSFSKDWSFYLLYYTEFTPTEKDEYACRVNHVTLSQPKIVKWDRDM

SEQ ID NO: 602 - protein, 123 aa, Artificial sequence
  synthetic sequence
STAPPAHGVGGGGSGGGGSGGGGSIQRTPKIQVYSCHPAENGKSNFLNCYVSGFHPSDIEVDLLKNGERIEKVEHSDLSFSKDWSFYLLYYTEFTPTEKDEYACRVNHVTLSQPKIVKWDRDM

SEQ ID NO: 603 - protein, 123 aa, Artificial sequence
  synthetic sequence
STAPPAHGVGCGGSGGGGSGGGGSIQRTPKIQVYSCHPAENGKSNFLNCYVSGFHPSDIEVDLLKNGERIEKVEHSDLSFSKDWSFYLLYYTEFTPTEKDEYACRVNHVTLSQPKIVKWDRDM

SEQ ID NO: 604 - protein, 123 aa, Artificial sequence
  synthetic sequence
STAPPAHGVGCGGSGGGGSGGGGSIQRTPKIQVYSRHPAENGKSNFLNCYVSGFHPSDIEVDLLKNGERIEKVEHSDLSFSKDWSFYLLYYTEFTPTEKDEYACRVNHVTLSQPKIVKWDRDM

SEQ ID NO: 605 - protein, 123 aa, Artificial sequence
  synthetic sequence
SLAPPAHGVGGGGSGGGGSGGGGSIQRTPKIQVYSCHPAENGKSNFLNCYVSGFHPSDIEVDLLKNGERIEKVEHSDLSFSKDWSFYLLYYTEFTPTEKDEYACRVNHVTLSQPKIVKWDRDM

SEQ ID NO: 606 - protein, 123 aa, Artificial sequence
  synthetic sequence
SLAPPAHGVGCGGSGGGGSGGGGSIQRTPKIQVYSCHPAENGKSNFLNCYVSGFHPSDIEVDLLKNGERIEKVEHSDLSFSKDWSFYLLYYTEFTPTEKDEYACRVNHVTLSQPKIVKWDRDM

SEQ ID NO: 607 - protein, 123 aa, Artificial sequence
  synthetic sequence
SLAPPAHGVGCGGSGGGGSGGGGSIQRTPKIQVYSRHPAENGKSNFLNCYVSGFHPSDIEVDLLKNGERIEKVEHSDLSFSKDWSFYLLYYTEFTPTEKDEYACRVNHVTLSQPKIVKWDRDM

What is claimed is:

1. A T-cell modulatory multimeric polypeptide comprising:
at least one heterodimer comprising:
a) a first polypeptide comprising:
i) a peptide epitope comprising an amino acid sequence selected from the group consisting of: STAPPAHGV; STAPPVHNV; SLAPPVHNV; SLAPPAHGV; SAPDTRPAP; VTSAPDTRPAPGSTAPPAHG; PDTRPAPGSTAPPAHGVTSA; and LLLLTVLTV; and
ii) first class I major histocompatibility complex (MHC) polypeptide;
b) a second polypeptide comprising a second class I MHC polypeptide, and
c) one or more immunomodulatory polypeptides,
wherein the first and/or the second polypeptide comprises the one or more immunomodulatory polypeptides,
and optionally wherein the first or the second polypeptide comprises an immunoglobulin (Ig) Fc polypeptide.

2. A T-cell modulatory multimeric polypeptide of claim 1, wherein at least one of the one or more immunomodulatory polypeptides is a variant immunomodulatory polypeptide that exhibits reduced affinity to a cognate co-immunomodulatory polypeptide compared to the affinity of a corresponding wild-type immunomodulatory polypeptide for the cognate co-immunomodulatory polypeptide.

3. A T-cell modulatory multimeric polypeptide of claim 2, wherein the ratio of the binding affinity of the wild-type immunomodulatory polypeptide to a cognate co-immunomodulatory polypeptide to the binding affinity of the variant immunomodulatory polypeptide to the cognate co-immunomodulatory polypeptide, when measured by bio-layer interferometry, is at least 1.5:1.

4. A T-cell modulatory multimeric polypeptide of claim 2, wherein:
the variant immunomodulatory polypeptide binds the co-immunomodulatory polypeptide with an affinity selected from the group consisting of from about 10⁻⁴ M to about 10⁻⁷ M, from about 10⁻⁴ M to about 10⁻⁶ M, or from about 10⁻⁴ M to about 10⁻⁵ M.

5. A T-cell modulatory multimeric polypeptide of any one of claims 1-4, wherein the first or the second polypeptide comprises an Ig Fc polypeptide, and wherein the Ig Fc polypeptide is an IgG1 Fc polypeptide.

6. A T-cell modulatory multimeric polypeptide of claim 5, wherein IgG1 Fc polypeptide comprises one or more amino acid substitutions selected from N297A, L234A, L235A, L234F, L235E, and P331S.

7. A T-cell modulatory multimeric polypeptide of any one of claims 1-6, wherein
a1) the first polypeptide comprises, in order from N-terminus to C-terminus:
i) the peptide epitope; and
ii) the first MHC polypeptide; and
b1) the second polypeptide comprises, in order from N-terminus to C-terminus:
i) the one or more immunomodulatory polypeptides;
ii) the second MHC polypeptide; and
iii) an Ig Fc polypeptide; or
a2) the first polypeptide comprises, in order from N-terminus to C-terminus:
i) the peptide epitope; and
ii) the first MHC polypeptide; and
b2) the second polypeptide comprises, in order from N-terminus to C-terminus:
i) the second MHC polypeptide; and
ii) the one or more immunomodulatory polypeptides; and
iii) an Ig Fc polypeptide; or
a3) the first polypeptide comprises, in order from N-terminus to C-terminus:
i) the peptide epitope; and
ii) the first MHC polypeptide; and
b3) the second polypeptide comprises, in order from N-terminus to C-terminus:
i) the second MHC polypeptide; and
ii) an Ig Fc polypeptide; and
iii) the one or more immunomodulatory polypeptides; or
a4) the first polypeptide comprises, in order from N-terminus to C-terminus:
i) the one or more immunomodulatory polypeptides;
ii) the peptide epitope; and
iii) the first MHC polypeptide; and
b4) the second polypeptide comprises, in order from N-terminus to C-terminus:
i) the second MHC polypeptide; and
ii) an Ig Fc polypeptide; or
a5) the first polypeptide comprises, in order from N-terminus to C-terminus:
i) the peptide epitope;
ii) the first MHC polypeptide; and
iii) the one or more immunomodulatory polypeptides; and
b5) the second polypeptide comprises, in order from N-terminus to C-terminus:
i) the second MHC polypeptide; and
ii) an immunoglobulin (Ig) Fc polypeptide.

8. A T-cell modulatory multimeric polypeptide of any one of claims 1-7, wherein the first MHC polypeptide is a β2-microglobulin polypeptide; and wherein the second MHC polypeptide is an MHC class I heavy chain polypeptide.

9. A T-cell modulatory multimeric polypeptide of any one of claims 1-8, wherein at least one of the one or more immunomodulatory polypeptides is a stimulatory polypeptide.

10. A T-cell modulatory multimeric polypeptide of claim 9, wherein the stimulatory polypeptide is selected from the group consisting of a 4-1BBL, ICOS-L, OX-40L, CD80, CD86, CD70, a cytokine, and variants and combinations thereof.

11. A T-cell modulatory multimeric polypeptide of any one of claims 9 and 10, wherein at least one of the one or more immunomodulatory polypeptides is an IL-2 polypeptide.

12. A T-cell modulatory multimeric polypeptide of claim 11, wherein the immunomodulatory polypeptide is a variant IL-2 polypeptide.

13. A T-cell modulatory multimeric polypeptide of claim 12, wherein the variant IL-2 polypeptide comprises: i) an H16A substitution and an F42A substitution; or ii) an H16T substitution and an F42A substitution.

14. A T-cell modulatory multimeric polypeptide of any one of claims 1-8, wherein at least one of the one or more immunomodulatory polypeptides is an inhibitory polypeptide, optionally wherein the inhibitory polypeptide is selected from the group consisting of PD-L1, FasL, a cytokine, and PD-L2, and variants and combinations thereof.

15. A T-cell modulatory multimeric polypeptide of any one of claims 1-14, wherein the multimeric polypeptide comprises two or more immunomodulatory polypeptides, and wherein at least two of the immunomodulatory polypeptides are the same.

16. A T-cell modulatory multimeric polypeptide of claim 15, wherein the two or more immunomodulatory polypeptides are in tandem.

17. A T-cell modulatory multimeric polypeptide of any of claims 1-6, wherein:
a1) the first polypeptide comprises, in order from N-terminus to C-terminus:
i) the peptide epitope; and
ii) the first MHC polypeptide; and
b1) the second polypeptide comprises, in order from N-terminus to C-terminus:
i) the one or more immunomodulatory polypeptides;
ii) the second MHC polypeptide; and
iii) an immunoglobulin (Ig) Fc polypeptide.

18. A T-cell modulatory multimeric polypeptide of any of claims 1-6, wherein:
a3) the first polypeptide comprises, in order from N-terminus to C-terminus:
i) the peptide epitope; and
ii) the first MHC polypeptide; and
b3) the second polypeptide comprises, in order from N-terminus to C-terminus:
i) the second MHC polypeptide; and
ii) an Ig Fc polypeptide; and
iii) the one or more immunomodulatory polypeptides.

19. A T-cell modulatory multimeric polypeptide of any one of claims 1-18, wherein the first polypeptide and the second polypeptide are covalently linked to one another, optionally wherein the covalent linkage is via a disulfide bond.

20. A T-cell modulatory multimeric polypeptide of claim 19, wherein the β2M polypeptide and the MHC heavy chain polypeptide are joined by a disulfide bond that joins a Cys residue in the β2M polypeptide and a Cys residue in the MHC heavy chain polypeptide, optionally wherein a Cys at amino acid residue 12 of the β2M polypeptide is disulfide bonded to a Cys at amino acid residue 236 of the MHC heavy chain polypeptide.

21. A T-cell modulatory multimeric polypeptide of claim 19, wherein the first polypeptide chain comprises a linker between the peptide epitope and the β2M polypeptide, and wherein the disulfide bond links a Cys present in the linker with a Cys of the MHC heavy chain polypeptide.

22. A T-cell modulatory multimeric polypeptide of claim 19, wherein the first polypeptide chain comprises a linker between the peptide epitope and the β2M polypeptide, and wherein the disulfide bond links a Cys substituted for Gly2 in the linker with a Cys substituted for Tyr84 of the MHC heavy chain polypeptide.

23. A T-cell modulatory multimeric polypeptide of any one of claims 1-18, wherein the first and the second polypeptides are covalently linked to one another via at least 2 disulfide bonds.

24. A T-cell modulatory multimeric polypeptide of claim 23, wherein:
a) a first disulfide bond is between: i) a Cys present in a linker between the peptide epitope and the first MHC class I polypeptide, wherein the first MHC class I polypeptide is a β2M polypeptide; and ii) a Cys residue introduced via a Y84C substitution in the second MHC class I polypeptide, wherein the second MHC class I polypeptide is an MHC Class I heavy chain polypeptide; and
b) a second disulfide bond is between: i) a Cys residue introduced into the β2M polypeptide via an R12C substitution; and ii) a Cys residue introduced into the MHC Class I heavy chain polypeptide via an A236C substitution.

25. A T-cell modulatory multimeric polypeptide of claim 24, wherein the linker comprises the amino acid sequence GCGGS.

26. A T-cell modulatory multimeric polypeptide of claim 24, wherein the linker comprises the amino acid sequence GCGGS(GGGGS)n, where n is an integer from 1 to 10.

27. A T-cell modulatory multimeric polypeptide of any one of claims 1-26, wherein the peptide epitope is a peptide of at least 9 amino acids in length, e.g., from 9 amino acids to about 25 amino acids (e.g., 10 amino acids (aa), 11 aa, 12 aa, 13 aa, 14 aa, 15 aa, 16 aa, 17 aa, 18 aa, 19 aa, 20 aa, 21 aa, 22 aa, 23 aa, 24 aa, or 25 aa, including within a range of from 9 to 20 amino acids, from 9 to 18 amino acids, from 9 to 15 amino acids, from 9 to 12 amino acids, from 9 to 10 amino acids, from 10 to 20 amino acids, and from 15 to 25 amino acids in length).

28. A T-cell modulatory multimeric polypeptide of any one of claims 1-27, wherein the first or the second MHC polypeptide comprises:
a) an amino acid sequence having at least 95% amino acid sequence identity to the HLA-A*0101, HLA-A*0201, HLA-A*0201, HLA-A*1101, HLA-A*2301, HLA-A*2402, HLA-A*2407, HLA-A*3303, or HLA-A*3401 amino acid sequence depicted in FIG. 7A; or
b) an amino acid sequence having at least 95% amino acid sequence identity to the HLA-B*0702, HLA-B*0801, HLA-B*1502, HLA-B*3802, HLA-B*4001, HLA-B*4601, or HLA-B*5301 amino acid sequence depicted in FIG. 8A; or
c) an amino acid sequence having at least 95% amino acid sequence identity to the HLA-C*0102, HLA-C*0303, HLA-C*0304, HLA-C*0401, HLA-C*0602, HLA-C*0701, HLA-C*0702, HLA-C*0801, or HLA-C*1502 depicted in FIG. 9A.

29. A T-cell modulatory multimeric polypeptide of any one of claims 1-27, wherein the first MHC polypeptide is a β2M polypeptide, and wherein the second MHC polypeptide comprises an amino acid sequence having at least 95% amino acid sequence identity to an HLA-A*0201 polypeptide.

30. A T-cell modulatory multimeric polypeptide of any one of claims 1-27, wherein the first MHC polypeptide is a β2M polypeptide, and wherein the second MHC polypeptide is an HLA-A*1101 polypeptide.

31. A T-cell modulatory multimeric polypeptide of any one of claims 1-27, wherein the first MHC polypeptide is a β2M polypeptide, and wherein the second MHC polypeptide comprises an amino acid sequence having at least 95% amino acid sequence identity to an HLA-A*3303 polypeptide.

32. A T-cell modulatory multimeric polypeptide of any one of claims 1-27, wherein the first MHC polypeptide is a β2M polypeptide, and wherein the second MHC polypeptide comprises an amino acid sequence having at least 95% amino acid sequence identity to an HLA-A*2401 polypeptide.

33. A T-cell modulatory multimeric polypeptide of any one of claims 1-32, wherein the peptide epitope comprises the amino acid sequence STAPPVHNV and has a length of 9 amino acids.

34. A T-cell modulatory multimeric polypeptide of any one of claims 1-32, wherein the peptide epitope comprises the amino acid sequence SLAPPVHNV and has a length of 9 amino acids.

35. A T-cell modulatory multimeric polypeptide of any one of claims 1-32, wherein the peptide epitope comprising the amino acid sequence STAPPAHGV and has a length of 9 amino acids.

36. A T-cell modulatory multimeric polypeptide of any one of claims 1-32, wherein the peptide epitope comprising the amino acid sequence SLAPPAHGV and has a length of 9 amino acids.

37. A T-cell modulatory multimeric polypeptide of any one of claims 1-36, wherein the first polypeptide and/or the second polypeptide comprises a tumor-targeting polypeptide (TTP).

38. A T-cell modulatory multimeric polypeptide of claim 37, wherein the TTP is an antibody specific for a cancer-associated antigen on the surface of a cancer cell.

39. A T-cell modulatory multimeric polypeptide of claim 38, wherein the antibody is a scFv or a nanobody.

40. A T-cell modulatory multimeric polypeptide of any one of claims 1-37, wherein the multimeric polypeptide comprises a first and a second heterodimer, and
wherein the first and second heterodimers are covalently bound by one or more disulfide bonds between the Ig Fc polypeptides of the first and second heterodimers.

41. A nucleic acid comprising a nucleotide sequence encoding a first or second polypeptide according to any one of claims 1-40.

42. An expression vector comprising the nucleic acid of claim 41.

43. A method of selectively modulating the activity of T cell specific for a peptide epitope, the method comprising contacting the T cell with a T-cell modulatory multimeric polypeptide according to any one of claims 1-40, wherein said contacting selectively modulates the activity of the epitope-specific T cell.

44. A method of treating a patient having a cancer, the method comprising administering to the patient an effective amount of a pharmaceutical composition comprising a T-cell modulatory multimeric polypeptide of any one of claims 1-40.

45. The method of claim 44, wherein the cancer is selected from the group consisting of an adenocarcinoma, a hematological cancer, a multiple myeloma, a B-cell lymphoma,

46. The method of claim 44 or claim 45, wherein said administering is subcutaneously, intraperitoneally, intramuscularly, intradermal, intratumoral, peritumoral, and/or intravenously.

47. A method of modulating an immune response in an individual, the method comprising administering to the individual an effective amount of a T-cell modulatory multimeric polypeptide of any one of claims 1-40,
wherein said administering induces an epitope-specific T cell response and an epitope-non-specific T cell response,
wherein the ratio of the epitope-specific T cell response to the epitope-non-specific T cell response is at least 2:1.

48. A method of delivering an immunomodulatory polypeptide selectively to a target T cell, the method comprising contacting a mixed population of T cells with a T-cell modulatory multimeric polypeptide of any one of claims 1-40, wherein the mixed population of T cells comprises the target T cell and non-target T cells, wherein the target T cell is specific for the MUC1 epitope present within the T-cell modulatory multimeric polypeptide, and wherein said contacting delivers the one or more immunomodulatory polypeptides present within the T-cell modulatory multimeric polypeptide to the target T cell.

49. A method of detecting, in a mixed population of T cells obtained from an individual, the presence of a target T cell that binds a peptide epitope, the method comprising:
a) contacting in vitro the mixed population of T cells with a T-cell modulatory multimeric polypeptide of any one of claims 1-40, wherein the T-cell modulatory multimeric polypeptide comprises the peptide epitope; and
b) detecting activation and/or proliferation of T cells in response to said contacting, wherein activated and/or proliferated T cells indicates the presence of the target T cell.
